(19) United States
(12) Patent Application Publication
(10) Pub. No.: US 2018/0265886 A1
(43) Pub. Date: Sep. 20, 2018

(54) HYPERSENSITIVE ABA RECEPTORS

(71) Applicant: The Regents of the University of California, Oakland, CA (US)

(72) Inventors: Sean Cutler, Riverside, CA (US); Michael Nuccio, Research Triangle Park, NC (US); Quideng Que, Research Triangle Park, NC (US)

(21) Appl. No.: 15/994,394

(22) Filed: May 31, 2018

Related U.S. Application Data
(62) Division of application No. 14/960,287, filed on Dec. 4, 2015.
Application No. 14/960,287 is a continuation-in-part of application No. PCT/US2015/047020, filed on Aug. 26, 2015.
(60) Provisional application No. 62/042,095, filed on Aug. 26, 2014.
(60) Provisional application No. 62/098,025, filed on Dec. 30, 2014.

(51) Int. Cl. C12N 15/82; C07K 14/415

(52) U.S. Cl. CPC C12N 15/8271; C12N 15/8293; C12N 15/8213; C07K 14/415; C12N 15/8273; C12N 15/8243

(57) ABSTRACT

Hypersensitive PYR/PYL polypeptides, compositions, and methods are provided.

### CROSS-REFERENCE TO RELATED PATENT APPLICATIONS

[0001] The present patent application is a divisional of U.S. patent application Ser. No. 14/960,287, filed Dec. 4, 2015, which is a continuation-in-part of PCT/US2015/047020, filed Aug. 26, 2015, which claims benefit of priority to U.S. Provisional Patent Application No. 62/042,095, filed Aug. 26, 2014 and U.S. Provisional Patent Application No. 62/098,025, filed Dec. 30, 2014, which are incorporated by reference for all purposes.

### STATEMENT AS TO RIGHTS TO INVENTIONS MADE UNDER FEDERALLY SPONSORED RESEARCH AND DEVELOPMENT

[0002] This invention was made with Government support under Grant No. 1258175 awarded by the National Science Foundation. The Government has certain rights in this invention.

### BACKGROUND OF THE INVENTION

[0003] Abscisic acid (ABA) is a plant hormone that regulates signal transduction associated with abiotic stress responses Cutler, S. R., et al. Annu. Rev. Plant Biol. 61, 651-679 (2010)). The ABA signaling pathway has been exploited to improve plant stress response and associated yield traits via numerous approaches (Wang, Y., et al. Plant J. 43, 413-424 (2005)). The direct application of ABA to plants improves their water use efficiency (Rademacher, W., Maisch, R., Liessegang, J., & Jung, J. (1987). Water consumption and yield formation in crop plants under the influence of synthetic analogues of abscisic acid. Plant growth regulators for agricultural and amenity use. BCPC Monograph, (36), 53-66); for this reason, the discovery of ABA agonists (Okamoto, M., et al., Proc. Natl. Acad. Sci. U.S.A. 110, 12132-12137 (2013); Park, S.-Y., et al. Science 324, 1068-1071 (2009)) has received increasing attention, as such molecules may be beneficial for improving crop yield. A complementary approach to activating the ABA pathway involves increasing a plant's sensitivity to ABA via genetic methods. For example, conditional antisense of farnesyl transferase beta subunit gene, which increases a plant's ABA sensitivity, improves yield under moderate drought in both canola and Arabidopsis (Wang et al., 2005).

[0004] It has recently been discovered that ABA elicits many of its cellular responses by binding to a soluble family of receptors called PYR/PYL proteins. PYR/PYL proteins belong to a large family of ligand-binding proteins named the START superfamily (Iyer, L. M., et al., Proteins Struct. Funct. Bioinforma. 43, 134-144, 2001; Ponting, C. P., and Aravind, L. (1999). Trends Biochem. Sci. 24, 130-132 1999). These proteins contain a conserved three-dimensional architecture consisting of seven anti-parallel beta sheets, which surround a central alpha helix to form a “helix-grip” motif; together, these structural elements form a ligand-binding pocket for binding ABA or other agonists.

[0005] Structural and functional studies have uncovered a series of conformational changes and critical contacts between PYR/PYL receptors and type II C protein phosphatases (PP2Cs) that are necessary for ABA-mediated PP2C inhibition by receptors. For example, when ABA or another agonist binds within the ligand-binding pockets of PYR/PYL proteins, it stabilizes a conformational change that allows the receptors to bind and inhibit a family of PP2Cs that normally repress ABA signaling (Weiner et al., 2010). In particular, ABA binding leads to a large rearrangement in a flexible “gate” loop that flanks the ligand-binding pocket. Upon ABA binding, the gate loop adopts a closed conformation that is stabilized by several direct contacts between the loop and ABA. This agonist-bound, closed form of the gate allows PYR/PYL proteins to dock into, and inhibit, the active site of PP2Cs. The resulting inhibition in turn allows activation of downstream kinases in the SnRK2 class, which are responsible for the regulation of the activity of transcription factors, ion channels and other proteins involved in ABA responses (Weiner, J. J., et al. (2010) Curr. Opin. Plant Biol. 13, 495-5022010). Thus, the stabilization of a closed gate conformation of the receptors plays a role in their activation and PYR/PYL receptors are molecular switches at the apex of a signaling cascade that regulates diverse ABA responses.

[0006] In addition to the role that gate closure plays in receptor activation, other structural rearrangements also occur. For example, PYR1, PYL1, and PYL2 are homodimers in solution, but bind to PP2Cs as monomers. The homodimer interface overlaps with the PP2C binding interface and therefore an intact receptor homodimer cannot bind to and inhibit the PP2C. Thus, dimer formation is antagonistic to ABA signaling and receptor dimer-breaking is a necessary step in receptor activation. Additionally, a recognition module containing a central conserved tryptophan “lock” residue located on the PP2C inserts into a small pore formed in the ABA-bound receptors. Mutation of the tryptophan lock residue abolishes receptor-mediated inactivation of PP2C activity, demonstrating a role of the lock residue's insertion into the receptor's pore.

[0007] Over-expression of wild type or mutant ABA receptors in transgenic Arabidopsis thaliana, Solanum lycopersicum and Oryza sativa improves drought tolerance (Gonzalez-Guzman, M., et al. (2014). J. Exp. Bot. eru219, 2014; Kim et al., J. Exp. Bot. 63, 1013-1024 2012; Santiago et al., Plant J. 60, 575-588 (2009)). ABA receptors with increased sensitivity relative to their wild type counterparts can elicit greater ABA responses when expressed in planta. Consistent with this, Pizzio et al., Plant Physiol. 163, 441-455 (2013) described the PYL4 mutation A194T mutant, which requires lower concentrations of ABA to elicit measured ABA responses in comparison to wild type PYL4. When this mutant is over-expressed in transgenic Arabidopsis, the plants have increased sensitivity to ABA relative to both wild type controls and PYL4 over-expression controls (Pizzio et al., Plant Physiol. 163, 441-455 (2013)). Moreover, the 35S::PYL4^{A194T} lines display better drought tolerance and water use than wild type or 35S::PYL4 overexpression lines. The A194T mutation is located in PYL4's carboxyl terminus, which is a part of the receptors that is highly variable in length and composition between receptors. This lack of conservation makes it difficult to predict the mechanism by which the mutation alters ABA sensitivity.

### BRIEF SUMMARY OF THE INVENTION

[0008] Mutations in PYR/PYL receptor proteins have been identified that result in the receptor proteins being hypersensitive to ABA. In some embodiments, nucleic acids (e.g., isolated) encoding such proteins are provided. In some embodiments, the nucleic acids comprises a polynucleotide encoding a mutated PYR/PYL receptor polypeptide comprising an amino acid substitution corresponding to the amino acid F61, V81, I110, E141, and A160 in PYR1 as set forth in SEQ ID NO:1, wherein the mutated PYR/PYL receptor has increased sensitivity to abscisic acid compared to a control PYR/PYL receptor lacking the substitution.

[0009] In some embodiments, the PYR/PYL receptor polypeptide comprises an amino acid substitution corresponding to the amino acid F61. In some embodiments, the amino acid substitution is selected from L and M.

[0010] In some embodiments, the PYR/PYL receptor polypeptide comprises an amino acid substitution corresponding to the amino acid V81. In some embodiments, the amino acid substitution is selected from I and Y.

[0011] In some embodiments, the PYR/PYL receptor polypeptide comprises an amino acid substitution corresponding to the amino acid I110. In some embodiments, the amino acid substitution is selected from C and S.

[0012] In some embodiments, the PYR/PYL receptor polypeptide comprises an amino acid substitution corresponding to the amino acid E141. In some embodiments, the amino acid substitution is selected from C, I, L, M, N, T, V, W, and Y.

[0013] In some embodiments, the PYR/PYL receptor polypeptide comprises an amino acid substitution corresponding to the amino acid A160. In some embodiments, the amino acid substitution is selected from C, I, and V.

[0014] In some embodiments, the PYR/PYL receptor polypeptide comprises an amino acid substitution corresponding to:

### F61L and A160C;

### F61M and A160V;

### F61M, I110S, and A160V; or

### F61L, V81I, I110C and A160V.

[0015] In some embodiments, the mutated PYR/PYL receptor polypeptide is substantially identical to (e.g., at least 50%, 55%, 60%, 65%, 70%, 75%, 80%, 85%, 90%, 91%, 92%, 93%, 94% 95%, 96%, 97%, 98%, or 99% identical to) any of SEQ ID NOs:1-119 or SEQ ID NOs:124-154 (e.g., 124, 125, 126, 127, 128, 129, 130, 131, 132, 133, 134, 135, 136, 137, 138, 139, 140, 141, 142, 143, 144, 145, 146, 147, 148, 149, 150, 151, 152, 153, or 154), 155-361 (e.g., 155, 156, 157, 158, 159, 160, 161, 162, 163, 164, 165, 166, 167, 168, 169, 170, 171, 172, 173, 174, 175, 176, 177, 178, 179, 180, 181, 182, 183, 184, 185, 186, 187, 188, 189, 190, 191, 192, 193, 194, 195, 196, 197, 198, 199, 200, 201, 202, 203, 204, 205, 206, 207, 208, 209, 210, 211, 212, 213, 214, 215, 216, 217, 218, 219, 220, 221, 222, 223, 224, 225, 226, 227, 228, 229, 230, 231, 232, 233, 234, 235, 236, 237, 238, 239, 240, 241, 242, 243, 244, 245, 246, 247, 248, 249, 250, 251, 252, 253, 254, 255, 256, 257, 258, 259, 260, 261, 262, 263, 264, 265, 266, 267, 268, 269, 270, 271, 272, 273, 274, 275, 276, 277, 278, 279, 280, 281, 282, 283, 284, 285, 286, 287, 288, 289, 290, 291, 292, 293, 294, 295, 296, 297, 298, 299, 300, 301, 302, 303, 304, 305, 306, 307, 308, 309, 310, 311, 312, 313, 314, 315, 316, 317, 318, 319, 320, 321, 322, 323, 324, 325, 326, 327, 328, 329, 330, 331, 332, 333, 334, 335, 336, 337, 338, 339, 340, 341, 342, 343, 344, 345, 346, 347, 348, 349, 350, 351, 352, 353, 354, 355, 356, 357, 358, 359, 360, or 361) or comprises any of SEQ ID NOs: 120-123.

[0016] Also provided is a plant (e.g. a transgenic or non-transgenic plant) comprising a polynucleotide encoding a PYR/PYL receptor polypeptide as described above or elsewhere herein, e.g., comprising an amino acid substitution corresponding to the amino acid F61, V81, I110, E141, and A160 in PYR1 as set forth in SEQ ID NO:1. In some embodiments, the plant will have increased sensitivity to ABA compared to a control plant lacking the polypeptide. In some embodiments, the polynucleotide is operably linked to a heterologous promoter. In some embodiments, the polynucleotide is operably linked to a native (non-heterologous) promoter. In some embodiments, the PYR/PYL receptor polypeptide comprises an amino acid substitution corresponding to: F61L and A160C; F61M and A160V; F61M, I110S, and A160V; or F61L, V81I, I110C and A160V. In some embodiments, the encoded PYR/PYL receptor polypeptide only has one (or in some embodiments, only 2, 3, or 4) amino acid substitution compared to the plant's native PYR/PYL receptor polypeptide. In some embodiments, the plant's native PYR/PYL receptor polypeptide coding sequence has been modified (e.g., by CRISPR) to contain the 1, 2, 3, or 4 substitutions. In some embodiments, the PYR/PYL receptor polypeptide comprises an amino acid substitution corresponding to the amino acid F61. In some embodiments, the amino acid substitution is selected from L and M. In some embodiments, the PYR/PYL receptor polypeptide comprises an amino acid substitution corresponding to the amino acid V81. In some embodiments, the amino acid substitution is selected from I and Y. In some embodiments, the PYR/PYL receptor polypeptide comprises an amino acid substitution corresponding to the amino acid I110. In some embodiments, the amino acid substitution is selected from C and S. In some embodiments, the PYR/PYL receptor polypeptide comprises an amino acid substitution corresponding to the amino acid E141. In some embodiments, the amino acid substitution is selected from C, I, L, M, N, T, V, W, and Y. In some embodiments, the PYR/PYL receptor polypeptide comprises an amino acid substitution corresponding to the amino acid A160. In some embodiments, the amino acid substitution is selected from C, I, and V. In some embodiments, the PYR/PYL receptor polypeptide comprises an amino acid substitution corresponding to: F61L and A160C; F61M and A160V; F61M, I110S, and A160V; or F61L, V81I, I110C and A160V.

Also provided is a plant (e.g., including but not limited to a maize plant) comprising an in situ mutated PYR/PYL receptor polypeptide comprising an amino acid substitution corresponding to the amino acid F61, V81, I110, E141, and A160 in PYR1 as set forth in SEQ ID NO:1, wherein the mutated PYR/PYL receptor polypeptide has increased sensitivity to abscisic acid compared to a control PYR/PYL receptor lacking the substitution. In some embodiments, the PYR/PYL receptor polypeptide comprises an amino acid substitution corresponding to the amino acid F61. In some embodiments, the amino acid substitution is selected from L and M. In some embodiments, the PYR/PYL receptor polypeptide comprises an amino acid substitution corresponding to the amino acid V81. In some embodiments, the amino acid substitution is selected from I and Y. In some embodiments, the PYR/PYL receptor polypeptide comprises an amino acid substitution corresponding to the amino acid I110. In some embodiments, the amino acid substitution is selected from C and S. In some embodiments, the PYR/PYL receptor polypeptide comprises an amino acid substitution corresponding to the amino acid E141. In some embodiments, the amino acid substitution is selected from C, I, L, M, N, T, V, W, and Y. In some embodiments, the PYR/PYL receptor polypeptide comprises an amino acid substitution corresponding to the amino acid A160. In some embodiments, the amino acid substitution is selected from C, I, and V. In some embodiments, the PYR/PYL receptor polypeptide comprises an amino acid substitution corresponding to: F61L and A160C; F61M and A160V; F61M, I110S, and A160V; or F61L, V81I, I110C and A160V. In some embodiments, the mutated PYR/PYL receptor polypeptide is substantially identical to (e.g., at least 50%, 55%, 60%, 65%, 70%, 75%, 80%, 85%, 90%, 91%, 92%, 93%, 94% 95%, 96%, 97%, 98%, or 99% identical to) any of SEQ ID NOs:1-119 or SEQ ID NOs:124-154 (e.g., 124, 125, 126, 127, 128, 129, 130, 131, 132, 133, 134, 135, 136, 137, 138, 139, 140, 141, 142, 143, 144, 145, 146, 147, 148, 149, 150, 151, 152, 153, or 154), 155-361 (e.g., 155, 156, 157, 158, 159, 160, 161, 162, 163, 164, 165, 166, 167, 168, 169, 170, 171, 172, 173, 174, 175, 176, 177, 178, 179, 180, 181, 182, 183, 184, 185, 186, 187, 188, 189, 190, 191, 192, 193, 194, 195, 196, 197, 198, 199, 200, 201, 202, 203, 204, 205, 206, 207, 208, 209, 210, 211, 212, 213, 214, 215, 216, 217, 218, 219, 220, 221, 222, 223, 224, 225, 226, 227, 228, 229, 230, 231, 232, 233, 234, 235, 236, 237, 238, 239, 240, 241, 242, 243, 244, 245, 246, 247, 248, 249, 250, 251, 252, 253, 254, 255, 256, 257, 258, 259, 260, 261, 262, 263, 264, 265, 266, 267, 268, 269, 270, 271, 272, 273, 274, 275, 276, 277, 278, 279, 280, 281, 282, 283, 284, 285, 286, 287, 288, 289, 290, 291, 292, 293, 294, 295, 296, 297, 298, 299, 300, 301, 302, 303, 304, 305, 306, 307, 308, 309, 310, 311, 312, 313, 314, 315, 316, 317, 318, 319, 320, 321, 322, 323, 324, 325, 326, 327, 328, 329, 330, 331, 332, 333, 334, 335, 336, 337, 338, 339, 340, 341, 342, 343, 344, 345, 346, 347, 348, 349, 350, 351, 352, 353, 354, 355, 356, 357, 358, 359, 360, or 361) or comprises any of SEQ ID NOs: 120-123.

[0017] Also provided are expression cassettes comprising a promoter operably linked to the polynucleotide encoding a PYR/PYL receptor polypeptide as described above or elsewhere herein, e.g., comprising an amino acid substitution corresponding to the amino acid F61, V81, I110, E141, and A160 in PYR1 as set forth in SEQ ID NO:1, wherein introduction of the expression cassette into a plant results in the plant having increased sensitivity to abscisic acid compared to a control plant lacking the expression cassette.

[0018] In some embodiments, the promoter is heterologous to the polynucleotide. In some embodiments, the promoter is inducible. In some embodiments, the promoter is a stress-inducible promoter.

[0019] Also provided is an expression vector comprising the expression cassette as described above or elsewhere herein.

[0020] Also provided are plants comprising an expression cassette as described above or elsewhere herein, wherein the plant has increased sensitivity to abscisic acid compared to a control plant lacking the expression cassette. Also provided is a plant cell from the plant.

[0021] Also provided is a seed, flower, leaf, fruit, processed food, or food ingredient from a plant comprising a hypersensitive a PYR/PYL receptor polypeptide as described herein.

[0022] Also provided is a method of producing a plant having increased sensitivity to abscisic acid. In some embodiments, the method comprises: introducing the expression cassette encoding a hypersensitive a PYR/PYL receptor polypeptide as described herein into a plurality of plants; and selecting a plant that expresses the polynucleotide from the plurality of plants.

[0023] In some embodiments, the method comprises: introducing a mutation into a polynucleotide encoding a hypersensitive PYR/PYL polypeptide as described herein, e.g., wherein the mutation results in a polynucleotide encoding an amino acid substitution corresponding to the amino acid F61, V81, 1110, E141, and A160 in PYR1 as set forth in SEQ ID NO:1. In some embodiments, the introducing occurs in situ in the genome of a plant cell. In some embodiments, the introducing comprises clustered regularly interspaced short palindromic repeats (CRISPR)/Cas genome editing.

[0024] Provided herein are methods and reagents for producing a plant (e.g., a maize plant) having increased sensitivity to abscisic acid, the method includes introducing a mutation into a polynucleotide encoding a PYR/PYL polypeptide, where the mutation is introduced in situ in the genome of the plant using RNA directed genome modification methods.

[0025] In one aspect, provided herein is a guide ribonucleic acid (gRNA). In certain embodiments the gRNA includes a CRISPR ribonucleic acid (crRNA) that is substantially identical to SEQ ID NOS: 363, 364, 365, 366, 367 or 369; and a transacting ribonucleic acid (tracRNA), where the PYR/PYL mutation target site comprises a nucleic acid that encodes for V89 of PYL-E or E149 of PYL-E.

[0026] In some embodiments of the gRNA, the PYR/PYL mutation target site includes a nucleic acid that encodes for V89 of PYL-E. In some embodiments, the PYR/PYL mutation target site has the sequence of SEQ ID NO:362.

[0027] In some embodiments, the PYR/PYL mutation target site includes a nucleic acid that encodes for E149 of PYL-E. In certain embodiments, the PYR/PYL mutation target site has the sequence of SEQ ID NO:368.

[0028] In certain embodiments, the tracRNA is linked to the 3′ end of the gRNA. In specific embodiments, the tracRNA is encoded by a nucleotide having a sequence that is substantially identical to SEQ ID NO: 370.

[0029] In another aspect, provided herein is an isolated nucleic acid that includes a polynucleotide encoding any one of the gRNAs described herein.

[0030] In another aspect, provided herein is an expression cassette that includes an RNA polymerase promoter operably linked to a polynucleotide encoding any one of the gRNAs described herein. In certain embodiments, the RNA polymerase promoter is an RNA polymerase III (polIII) promoter. In specific embodiments, the polIII promoter is a U3 promoter or a U6 promoter. In some embodiments, the expression cassette has the sequence of any one of SEQ ID NOS:371-373.

[0031] In another aspect, provided herein is an expression vector that includes an expression cassette, where the expression cassette includes an RNA polymerase promoter operably linked to a polynucleotide encoding any one of the gRNAs described herein.

[0032] In another aspect, provided herein is an expression vector that includes a first expression cassette and a second expression cassette. In certain embodiments, the first expression cassette is an expression cassette that includes an RNA polymerase promoter operably linked to a polynucleotide encoding any one of the gRNAs described herein and the second expression cassette is an expression cassette comprising a promoter operably linked to a polynucleotide encoding a CRISPR-associated endonuclease 9 (Cas9). In some embodiments, the expression vector includes a third expression cassette, wherein the third expression cassette is an expression cassette that includes an RNA polymerase promoter operably linked to a polynucleotide encoding any one of the gRNAs described herein, and the third expression cassette is different than the first expression cassette.

[0033] In some embodiments, the expression vector includes a first, second and third expression cassette, where the first expression cassette is an expression cassette that includes a promoter operably linked to a polynucleotide encoding a CRISPR-associated endonuclease 9 (Cas9), the second expression cassette has a sequence that is substantially identical to SEQ ID NO: 371 or SEQ ID NO:372, and the third expression cassette has a sequence that is substantially identical to SEQ ID NO:373. In certain embodiments, the promoter operably linked to the polynucleotide encoding Cas9 is an ubiquitin-1 promoter (prUbi-10).

[0034] In another aspect, provided herein is a cell that includes any of the expression vectors described above or elsewhere herein.

[0035] Also provided is a plant that includes an expression vector as described above or elsewhere herein. In some embodiments, the plant is a maize plant.

[0036] Also provided is a plant cell from the plant described above or elsewhere herein.

[0037] In another aspect, provided herein is a seed, flower, leaf, fruit, processed food, or food ingredient from the plant described above or elsewhere herein. In certain embodiments, the introduction of the expression vector into the plant described above or elsewhere herein results in the plant having increased sensitivity to abscisic acid compared to a control plant lacking the expression cassette.

[0038] In another aspect, provided herein is a method of producing a plant having a mutation at a genomic PYR/PYL mutation target site. In some embodiments the method includes introducing into plant cells an expression vector that includes a polynucleotide encoding a gRNA and a Cas9 as described above or elsewhere herein and at least one repair nucleic acid comprising the mutation. In certain embodiments, the mutation is introduced in the genomic PYR/PYLR mutation target site by a homologous recombination upon a Cas9 cleavage event in the genomic PYR/PYLR mutation target site. In some embodiments, the method further includes selecting plant cells having the mutation; thereby producing the plant. In some embodiments, the introducing occurs in situ in the genome of a plant cell. In some embodiments, the mutation is introduced by introducing into a plant embryo cell the expression vector and at least one repair nucleic acid, where the genome of the plant embryo comprises the PYR/PYL mutation target site and where the repair nucleic acid comprises the mutation and introduces the mutation at the PYR/PYL mutation target site by homologous recombination upon a Cas9 cleavage event in the PYL-E mutation target site.

[0039] In some embodiments, the repair nucleic acid has a sequence that is substantially identical to any one of the sequence of SEQ ID NOS:375 to 387 In certain embodiments, the repair nucleic acid has a sequence that is substantially identical to SEQ ID NO:377. In some embodiments, the repair nucleic acid has a sequence that is substantially identical to the sequence of SEQ ID NO:387. In other embodiments, two repair nucleic acids are introduced, and wherein the repair nucleic acids have sequences that are substantially identical to SEQ ID NO:377 and SEQ ID NO:379. In specific embodiments, the plant is a maize plant.

[0040] In another aspect, provided herein is a kit that includes an expression vector of that includes a polynucleotide encoding a gRNA and a polynucleotide encoding a Cas9 as described above or elsewhere herein and at least one repair nucleic acid, wherein the repair nucleic acid comprises a PYL-E mutation and is capable of introducing the PYL-E mutation in situ in a plant cell genome by homologous recombination upon a Cas9 cleavage event. In some embodiments, the at least one repair nucleic acid has a sequence that is substantially identical to SEQ ID NOS::374 to 386.

[0041] In another aspect, provided herein is an isolated nucleic acid comprising a polynucleotide encoding a mutated PYR/PYL receptor polypeptide comprising an amino acid substitution corresponding to the amino acid V89 in PYL-E, wherein the amino acid substitution is A (SEQ ID NO:389). In some embodiments, the mutated PYR/PYL receptor polypeptide further comprises an amino acid substitution corresponding to the amino acid E149. In certain embodiments the amino acid substitution corresponding to the amino acid E149 is L (SEQ ID NO:390).

[0042] In yet another aspect, provided herein is an isolated nucleic acid comprising a polynucleotide encoding a fusion protein comprising a mutated PYR/PYL receptor polypeptide and a fusion partner polypeptide, wherein the mutated PYR/PYL receptor polypeptide comprises an amino acid substitution corresponding to the amino acid V89 in PYL-E, wherein the amino acid substitution is A. In certain embodiments, the mutated PYR/PYL receptor polypeptide further comprises an amino acid substitution corresponding to the amino acid E149. In specific embodiments, the amino acid substitution corresponding to the amino acid E149 is L.

[0043] In some embodiments, the fusion partner polypeptide includes a transcription activation domain or a transcription modulation domain. In certain embodiments, the transcription activation domain is VP16 or VP64. In certain embodiments, the fusion protein further comprises a nuclear localization signal sequence. In some embodiments, the mutated PYR/PYL receptor polypeptide has increased sensitivity to abscisic acid compared to a control PYR/PYL receptor polypeptide lacking the substitution.

[0044] Provided herein is a cell comprising a polynucleotide as described above or elsewhere herein. In certain embodiments, the polynucleotide is a heterologous polypeptide. In some embodiments, the cell is a non-plant eukaryotic cell.

[0045] In yet another embodiment, provided herein is a plant that includes a polynucleotide as described above or elsewhere herein. In certain embodiments, the plant is a maize plant.

[0046] In another embodiment, provided herein is an expression cassette comprising a promoter operably linked to a polynucleotide as described above or elsewhere herein. In some embodiments, the promoter is heterologous to the polynucleotide. In certain embodiments, the promoter is inducible. In some embodiments, the promoter is a stress-inducible promoter.

[0047] In another embodiment, provided herein is an expression vector comprising the expression cassette as described above or elsewhere herein.

[0048] In another aspect, provided herein is a plant that includes the expression cassette as described above or elsewhere herein. In another aspect, provided herein is a plant cell from the plant as described above or elsewhere herein. In yet another aspect, provided herein is a seed, flower, leaf, fruit, processed food, or food ingredient from the plant as described above or elsewhere herein.

[0049] Other aspects of the invention are described elsewhere herein.

### Definitions

[0050] The term “PYR/PYL receptor polypeptide” refers to a protein characterized in part by the presence of one or more or all of a polyketide cyclase domain 2 (PF10604), a polyketide cyclase domain 1 (PF03364), and a Bet V I domain (PF03364), which in wild-type form mediates abscisic acid (ABA) and ABA analog signaling. A wide variety of PYR/PYL receptor polypeptide sequences are known in the art. In some embodiments, a PYR/PYL receptor polypeptide comprises a polypeptide that is substantially identical to PYR1 (SEQ ID NO:1), PYL1 (SEQ ID NO:2), PYL2 (SEQ ID NO:3), PYL3 (SEQ ID NO:4), PYL4 (SEQ ID NO:5), PYL5 (SEQ ID NO:6), PYL6 (SEQ ID NO:7), PYL7 (SEQ ID NO:8), PYL8 (SEQ ID NO:9), PYL9 (SEQ ID NO:10), PYL10 (SEQ ID NO:11), PYL11 (SEQ ID NO:12), PYL12 (SEQ ID NO:13), or PYL13 (SEQ ID NO:14), or to any of SEQ ID NOs:15-119.

[0051] A “wild-type PYR/PYL receptor polypeptide” refers to a naturally occurring PYR/PYL receptor polypeptide that mediates abscisic acid (ABA) and ABA analog signaling.

[0052] A “mutated PYR/PYL receptor polypeptide” refers to a PYR/PYL receptor polypeptide that is a variant from a naturally-occurring (i.e., wild-type) PYR/PYL receptor polypeptide. As used herein, a mutated PYR/PYL receptor polypeptide comprises one, two, three, four, or more amino acid substitutions relative to a corresponding wild-type PYR/PYL receptor polypeptide while retaining ABA-responsiveness of the receptor. In this context, a “mutated” polypeptide can be generated by any method for generating non-wild type nucleotide sequences. In some embodiments, a mutated PYR/PYL receptor polypeptide is hypersensitive, meaning the mutant receptor polypeptide is activated by ABA more strongly than a corresponding homologous wildtype receptor (or at least compared to an otherwise identical PYR/PYL polypeptide having the wildtype amino acid at the mutated position described herein) would be activated by the same concentration of ABA, or that the mutant receptor polypeptide is activated by a lower (e.g., half or less of the) concentration of ABA than activates the corresponding homologous wildtype receptor, or both. In some embodiments, the mutant receptor polypeptide can be determined visually in a HAB1 yeast two-hybrid assay to respond to 0.25 μM or less ABA.

[0053] An “amino acid substitution” refers to replacing the naturally occurring amino acid residue in a given position (e.g., the naturally occurring amino acid residue that occurs in a wild-type PYR/PYL receptor polypeptide) with an amino acid residue other than the naturally-occurring residue. For example, the naturally occurring amino acid residue at position 60 of the wild-type PYR1 receptor polypeptide sequence (SEQ ID NO:1) is histidine (H60); accordingly, an amino acid substitution at H60 refers to replacing the naturally occurring histidine with any amino acid residue other than histidine.

[0054] An amino acid residue “corresponding to an amino acid residue [X] in [specified sequence,” or an amino acid substitution “corresponding to an amino acid substitution [X] in [specified sequence]” refers to an amino acid in a polypeptide of interest that aligns with the equivalent amino acid of a specified sequence. Generally, as described herein, the amino acid corresponding to a position of a specified PYR/PYL receptor polypeptide sequence can be determined using an alignment algorithm such as BLAST. In some embodiments of the present invention, “correspondence” of amino acid positions is determined by aligning to a region of the PYR/PYL receptor polypeptide comprising SEQ ID NO:1, as discussed further herein. When a PYR/PYL receptor polypeptide sequence differs from SEQ ID NO:1 (e.g., by changes in amino acids or addition or deletion of amino acids), it may be that a particular mutation associated with hypersensitive activity of the PYR/PYL receptor will not be in the same position number as it is in SEQ ID NO:1. For example, amino acid position V85 of PYL2 (SEQ ID NO:3) aligns with amino acid position V81 of PYR1 (SEQ ID NO:1), as can be readily illustrated in an alignment of the two sequences. In this example, amino acid position 85 in SEQ ID NO:3 corresponds to position 81 in SEQ ID NO:1. Examples of corresponding positions are shown in FIG. 2

[0055] Two nucleic acid sequences or polypeptides are said to be “identical” if the sequence of nucleotides or amino acid residues, respectively, in the two sequences is the same when aligned for maximum correspondence as described below. The terms “identical” or percent “identity,” in the context of two or more nucleic acids or polypeptide sequences, refer to two or more sequences or subsequences that are the same or have a specified percentage of amino acid residues or nucleotides that are the same, when compared and aligned for maximum correspondence over a comparison window, as measured using one of the following sequence comparison algorithms or by manual alignment and visual inspection. When percentage of sequence identity is used in reference to proteins or peptides, it is recognized that residue positions that are not identical often differ by conservative amino acid substitutions, where amino acids residues are substituted for other amino acid residues with similar chemical properties (e.g., charge or hydrophobicity) and therefore do not change the functional properties of the molecule. Where sequences differ in conservative substitutions, the percent sequence identity may be adjusted upwards to correct for the conservative nature of the substitution. Means for making this adjustment are well known to those of skill in the art. Typically this involves scoring a conservative substitution as a partial rather than a full mismatch, thereby increasing the percentage sequence identity. Thus, for example, where an identical amino acid is given a score of 1 and a non-conservative substitution is given a score of zero, a conservative substitution is given a score between zero and 1. The scoring of conservative substitutions is calculated according to, e.g., the algorithm of Meyers & Miller, Computer Applic. Biol. Sci. 4:11-17 (1988) e.g., as implemented in the program PC/GENE (Intelligenetics, Mountain View, Calif., USA).

[0056] The phrase “substantial identity” or “substantially identical,” used in the context of two nucleic acids or polypeptides, refers to a sequence that has at least 50% sequence identity with a reference sequence. Alternatively, percent identity can be any integer from 50% to 100%. In some embodiments, a sequence is substantially identical to a reference sequence if the sequence has at least 50%, 55%, 60%, 65%, 70%, 75%, 80%, 85%, 90%, 91%, 92%, 93%, 94%, 95%, 96%, 97%, 98%, or 99% sequence identity to the reference sequence as determined using the methods described herein; preferably BLAST using standard parameters, as described below. Embodiments of the present invention provide for nucleic acids encoding polypeptides that are substantially identical to any of SEQ ID NO:1-119 or SEQ ID NOs:155-361.

[0057] For sequence comparison, typically one sequence acts as a reference sequence, to which test sequences are compared. When using a sequence comparison algorithm, test and reference sequences are entered into a computer, subsequence coordinates are designated, if necessary, and sequence algorithm program parameters are designated. Default program parameters can be used, or alternative parameters can be designated. The sequence comparison algorithm then calculates the percent sequence identities for the test sequences relative to the reference sequence, based on the program parameters.

[0058] A “comparison window,” as used herein, includes reference to a segment of any one of the number of contiguous positions selected from the group consisting of from 20 to 600, usually about 50 to about 200, more usually about 100 to about 150 in which a sequence may be compared to a reference sequence of the same number of contiguous positions after the two sequences are optimally aligned. Methods of alignment of sequences for comparison are well-known in the art. Optimal alignment of sequences for comparison can be conducted, e.g., by the local homology algorithm of Smith & Waterman, Adv. Appl. Math. 2:482 (1981), by the homology alignment algorithm of Needleman & Wunsch, J. Mol. Biol. 48:443 (1970), by the search for similarity method of Pearson & Lipman, Proc. Nat'l. Acad. Sci. USA 85:2444 (1988), by computerized implementations of these algorithms (GAP, BESTFIT, FASTA, and TFASTA in the Wisconsin Genetics Software Package, Genetics Computer Group, 575 Science Dr., Madison, Wis.), or by manual alignment and visual inspection.

[0059] Algorithms that are suitable for determining percent sequence identity and sequence similarity are the BLAST and BLAST 2.0 algorithms, which are described in Altschul et al. (1990) J Mol. Biol. 215: 403-410 and Altschul et al. (1977) Nucleic Acids Res. 25: 3389-3402, respectively. Software for performing BLAST analyses is publicly available through the National Center for Biotechnology Information (NCBI) web site. The algorithm involves first identifying high scoring sequence pairs (HSPs) by identifying short words of length W in the query sequence, which either match or satisfy some positive-valued threshold score T when aligned with a word of the same length in a database sequence. T is referred to as the neighborhood word score threshold (Altschul et al, supra). These initial neighborhood word hits acts as seeds for initiating searches to find longer HSPs containing them. The word hits are then extended in both directions along each sequence for as far as the cumulative alignment score can be increased. Cumulative scores are calculated using, for nucleotide sequences, the parameters M (reward score for a pair of matching residues; always >0) and N (penalty score for mismatching residues; always <0). For amino acid sequences, a scoring matrix is used to calculate the cumulative score. Extension of the word hits in each direction are halted when: the cumulative alignment score falls off by the quantity X from its maximum achieved value; the cumulative score goes to zero or below, due to the accumulation of one or more negative-scoring residue alignments; or the end of either sequence is reached. The BLAST algorithm parameters W, T, and X determine the sensitivity and speed of the alignment. The BLASTN program (for nucleotide sequences) uses as defaults a word size (W) of 28, an expectation (E) of 10, M=1, N=−2, and a comparison of both strands. For amino acid sequences, the BLASTP program uses as defaults a word size (W) of 3, an expectation (E) of 10, and the BLOSUM62 scoring matrix (see Henikoff & Henikoff, Proc. Natl. Acad. Sci. USA 89:10915 (1989)).

[0060] The BLAST algorithm also performs a statistical analysis of the similarity between two sequences (see, e.g., Karlin & Altschul, Proc. Nat'l. Acad. Sci. USA 90:5873-5787 (1993)). One measure of similarity provided by the BLAST algorithm is the smallest sum probability (P(N)), which provides an indication of the probability by which a match between two nucleotide or amino acid sequences would occur by chance. For example, a nucleic acid is considered similar to a reference sequence if the smallest sum probability in a comparison of the test nucleic acid to the reference nucleic acid is less than about 0.01, more preferably less than about 10⁻⁵, and most preferably less than about 10⁻²⁰.

[0061] The term “promoter,” as used herein, refers to a polynucleotide sequence capable of driving transcription of a coding sequence in a cell. Thus, promoters used in the polynucleotide constructs of the invention include cis-acting transcriptional control elements and regulatory sequences that are involved in regulating or modulating the timing and/or rate of transcription of a gene. For example, a promoter can be a cis-acting transcriptional control element, including an enhancer, a promoter, a transcription terminator, an origin of replication, a chromosomal integration sequence, 5′ and 3′ untranslated regions, or an intronic sequence, which are involved in transcriptional regulation. These cis-acting sequences typically interact with proteins or other biomolecules to carry out (turn on/off, regulate, modulate, etc.) gene transcription. A “plant promoter” is a promoter capable of initiating transcription in plant cells. A “constitutive promoter” is one that is capable of initiating transcription in nearly all tissue types, whereas a “tissue-specific promoter” initiates transcription only in one or a few particular tissue types.

[0062] A polynucleotide sequence is “heterologous” to an organism or a second polynucleotide sequence if it originates from a foreign species, or, if from the same species, is modified from its original form. For example, when a promoter is said to be operably linked to a heterologous coding sequence, it means that the coding sequence is derived from one species whereas the promoter sequence is derived another, different species; or, if both are derived from the same species, the coding sequence is not naturally associated with the promoter (e.g., is a genetically engineered coding sequence, e.g., from a different gene in the same species, or an allele from a different ecotype or variety).

[0063] An “expression cassette” refers to a nucleic acid construct that, when introduced into a host cell, results in transcription and/or translation of an RNA or polypeptide, respectively. Antisense or sense constructs that are not or cannot be translated are expressly included by this definition. In the case of both expression of transgenes and suppression of endogenous genes (e.g., by antisense, or sense suppression) one of skill will recognize that the inserted polynucleotide sequence need not be identical, but may be only substantially identical to a sequence of the gene from which it was derived. As explained herein, these substantially identical variants are specifically covered by reference to a specific nucleic acid sequence.

[0064] The term “host cell” refers to any cell capable of replicating and/or transcribing and/or translating a heterologous polynucleotide. Thus, a “host cell” refers to any prokaryotic cell (including but not limited to E. coli) or eukaryotic cell (including but not limited to yeast cells, mammalian cells, avian cells, amphibian cells, plant cells, fish cells, and insect cells), whether located in vitro or in vivo. For example, host cells may be located in a transgenic animal or transgenic plant. prokaryotic cell (including but not limited to E. coli) or eukaryotic cells (including but not limited to yeast cells, mammalian cells, avian cells, amphibian cells, plant cells, fish cells, and insect cells). Host cells can be for example, transformed with the heterologous polynucleotide.

[0065] The term “plant” includes whole plants, shoot vegetative organs and/or structures (e.g., leaves, stems and tubers), roots, flowers and floral organs (e.g., bracts, sepals, petals, stamens, carpels, anthers), ovules (including egg and central cells), seed (including zygote, embryo, endosperm, and seed coat), fruit (e.g., the mature ovary), seedlings, plant tissue (e.g., vascular tissue, ground tissue, and the like), cells (e.g., guard cells, egg cells, trichomes and the like), and progeny of same. The class of plants that can be used in the method of the invention is generally as broad as the class of higher and lower plants amenable to transformation techniques, including angiosperms (monocotyledonous and dicotyledonous plants), gymnosperms, ferns, and multicellular algae. It includes plants of a variety of ploidy levels, including aneuploid, polyploid, diploid, haploid, and hemizygous.

### BRIEF DESCRIPTION OF THE DRAWINGS

[0066] FIG. 1 provides signal in a yeast two-hybrid assay with ABA concentration shown at the top and the identity of the mutants shown on the left side.

[0067] FIG. 2 provides the corresponding naturally-occurring amino acid at the five positions described herein for a number of different PYR/PYL proteins.

[0068] FIG. 3 provides an alignment of the middle portion a number of PYR/PYL proteins. (SEQ ID NOs:142-154)

[0069] FIG. 4 provides signal in a yeast two-hybrid assay and includes multiple mutations within PYR1.

[0070] FIG. 5 depicts a biolistic transformation vector pZmPYLE-V89A carrying expression cassettes for maize-optimized Cas9 and ZmPYLE-V89A gRNA to mediate cleavage at the ZmPYL-E target sequence (5′-CGCGA CGTCA ACGTC AAGAC-3′ (SEQ ID NO:362))

[0071] FIG. 6 provides a schematic map of binary vector pZmPYLE-E149L used for delivery with Agrobacterium-mediated transformation.

[0072] FIG. 7 provides a schematic map of plasmid vector pZmPYLE-V89A-E149L carrying expression cassettes for 2 different gRNAs and Cas9.

[0073] FIG. 8 provides a schematic map of binary plant transformation vector 23190 carrying expression cassettes for Cas9, gRNA and selectable marker gene PMI for mediating ZmPYL-E E149L mutagenesis.

[0074] FIG. 9A-B provide a schematic map of binary plant transformation vectors 23136 and 23189 carrying expression cassettes for Cas9, gRNA and selectable marker gene PMI for mediating ZmPYL-D E169L mutagenesis.

[0075] FIG. 10A-10B provide a schematic map of binary plant plant transformation vectors 22981 and 23191 carrying expression cassettes for Cas9, gRNA and selectable marker gene PMI for mediating ZmPYL-F E164L mutagenesis.

[0076] FIG. 11 provides a schematic map of binary plant plant transformation vector 23192 carrying expression cassettes for Cas9, gRNA and selectable marker gene PMI for mediating ZmPYL-E E148L.

[0077] FIG. 12 provides a schematic drawing of end point assay example to detect specific DNA sequence change (GA to CT) in ZmPYL-F that results in E164L amino acid residue mutation.

[0078] FIG. 13 shows sequence alignment (SEQ ID NOS:414-430) of targeted mutations in ZmPYL-F mediated by gRNA-Cas9 expressed from vector 22981.

### DETAILED DESCRIPTION OF THE INVENTION

### I. Introduction

[0079] To identify mutations causing increased receptor ABA sensitivity, we screened for mutants that lower the concentration of ABA required to induce a detectable interaction between PYR1 and HAB1 using a collection of PYR1 mutants that contain all possible single amino acid substitutions residues located in close proximity to ABA. Based on these results, we describe mutations in highly-conserved residues that substantially increase receptor ABA sensitivity.

[0080] Mutations in PYR/PYL receptor polypeptides have been discovered that result in hypersensitive forms of the PYR/PYL receptor, i.e., the mutated receptors are more responsive to the ABA compared to a corresponding wildtype PYR/PYL polypeptide.

[0081] Expression in a plant of one or more hypersensitive mutant PYR/PYl receptor polypeptides as described here will result in a plant with increased ABA-sensitivity, and in some embodiments, higher stress tolerance or other phenotypes associated with ABA-responsiveness.

[0082] Also provided herein are methods and reagents for producing a plant (e.g., a maize plant) having increased sensitivity to abscisic acid, the method includes introducing a mutation into a polynucleotide encoding a PYR/PYL polypeptide, where the mutation is introduced in situ in the genome of the plant using RNA directed genome modification methods.

### II. Hypersensitive PYR/PYL Receptor Polypeptides

[0083] A wide variety of wild-type (naturally occurring) PYR/PYL polypeptide sequences are known in the art. Although PYR1 was originally identified as an abscisic acid (ABA) receptor in Arabidopsis, in fact PYR1 is a member of a group of at least 14 proteins (PYR/PYL proteins) in the same protein family in Arabidopsis that also mediate ABA signaling. This protein family is also present in other plants (see, e.g., SEQUENCE LISTING) and is characterized in part by the presence of one or more or all of a polyketide cyclase domain 2 (PF10604), a polyketide cyclase domain 1 (PF03364), and a Bet V I domain (PF03364). START/Bet v 1 superfamily domain are described in, for example, Radauer, BMC Evol. Biol. 8:286 (2008). In some embodiments, a wild-type PYR/PYL receptor polypeptide comprises any of SEQ ID NOs:1-119. In some embodiments, a wild-type PYR/PYL receptor polypeptide is substantially identical to (e.g., at least 50%, 55%, 60%, 65%, 70%, 75%, 80%, 85%, 90%, 91%, 92%, 93%, 94% 95%, 96%, 97%, 98%, or 99% identical to) any of SEQ ID NOs:1-119.

[0084] PYR/PYL receptor proteins have a conserved START-domain ligand-binding pocket flanked by two loops called the “gate” and the “latch” (Melcher, K. et al., Nature 462 (2009)). ABA binds to a PYR/PYL receptor protein at the ligand-binding pocket and ABA binding induces closure of the loops to seal ABA inside the ligand-binding pocket. The ligand-binding pocket of a PYR/PYL receptor polypeptide comprises amino acid residues that are in close proximity (e.g., within about 5 Å) to a PYR/PYL ligand (e.g., ABA) or a ligand-contacting water molecule when the ligand is bound to the PYR/PYL receptor. There are 25 residues that make up the PYR1 ligand-binding pocket. The residues of the ligand-binding pocket are also highly conserved among other PYR/PYL family members.

[0085] PYR/PYL receptor proteins directly bind to type 2 protein phosphatases (PP2Cs) and thus also contain a PP2C binding interface. The PP2C binding interface of a PYR/PYL receptor polypeptide comprises amino acid residues that are in close proximity (e.g., within about 5A) to PP2C when PP2C, the PYR/PYL receptor, and ABA are all bound together in a ternary complex. There are 25 residues that make up the PYR1 PP2C binding interface. The residues of the PP2C binding interface are also highly conserved among other PYR/PYL family members.

[0086] Hypersensitive PYR/PYL receptor polypeptides are non-naturally-occurring variants from naturally occurring (i.e., wild-type) PYR/PYL receptor polypeptides, wherein the variant (mutant) PYR/PYL receptor polypeptide is able to bind to and/or inhibit the activity of a PP2C in the presence of abscisic acid to a greater extent than a control PYR/PYL receptor polypeptide in the presence of the same concentration of ABA. Hypersensitive active PYR/PYL receptor polypeptides as described herein comprise one or more amino acid substitutions compared to a wild type PYR/PYL receptor polypeptide. In some embodiments, a hypersensitive PYR/PYL receptor polypeptide is substantially identical to (e.g., at least 50%, 55%, 60%, 65%, 70%, 75%, 80%, 85%, 90%, 91%, 92%, 93%, 94% 95%, 96%, 97%, 98%, or 99% identical to) any of SEQ ID NO:1, 2, 3, 4, 5, 6, 7, 8, 9, 10, 11, 12, 13, 14, 15, 16, 17, 18, 19, 20, 21, 22, 23, 24, 25, 26, 27, 28, 29, 30, 31, 32, 33, 34, 35, 36, 37, 38, 39, 40, 41, 42, 43, 44, 45, 46, 47, 48, 49, 50, 51, 52, 53, 54, 55, 56, 57, 58, 59, 60, 61, 62, 63, 64, 65, 66, 67, 68, 69, 70, 71, 72, 73, 74, 75, 76, 77, 78, 79, 80, 81, 82, 83, 84, 85, 86, 87, 88, 89, 90, 91, 92, 93, 94, 95, 96, 97, 98, 99, 100, 101, 102, 103, 104, 105, 106, 107, 108, 109, 110, 111, 112, 113, 114, 115, 116, 117, 118, or 119 and comprises 1, 2, 3, 4, or more mutations (e.g., amino acid substitutions) as described herein. In some embodiments, a hypersensitive PYR/PYL receptor polypeptide comprises SEQ ID NO:120, 121, 122, or 123 and comprises 1, 2, 3, 4, or more mutations (e.g., amino acid substitutions) as described herein:

(SEQ ID NO: 120)
CxSxxxxxxxAPxxxxWxxxxxFxxPxxxxxFxxxC
(SEQ ID NO: 121)
GxxRxVxxxSxxPAxxSxExLxxxD
(SEQ ID NO: 122)
GGxHRLxNYxS
(SEQ ID NO: 123)
ESxxVDxPxGxxxxxTxxFxxxxxxxNLxxL.

[0087] As shown in the Examples, it has been discovered that mutations can be made at any of several positions in PYR/PYL receptor polypeptides result in hypersensitivity to ABA. These positions are (corresponding to their position in Arabidopsis PYR1 (SEQ ID NO:1)): F61, V81, I110, E141, and A160. In some embodiments, a mutated PYR/PYL receptor polypeptide comprises one or more (e.g., one, two, three, or four) amino acid substitutions corresponding to these positions. For example, in some embodiments, the mutated PYR/PYL receptor polypeptide comprises at least the following corresponding mutations:

### F61L and A160C;

### F61M and A160V;

### F61M, I110S, and A160V; or

### F61L, V81I, I110C and A160V.

```
SEQ ID NO: 1; Arabidopsis wildtype PYR1
Met Pro Ser Glu Leu Thr Pro Glu Glu Arg Ser Glu Leu Lys Asn Ser
  1 5 10 15
Ile Ala Glu Phe His Thr Tyr Gln Leu Asp Pro Gly Ser Cys Ser Ser
                        20 25 30
Leu His Ala Gln Arg Ile His Ala Pro Pro Glu Leu Val Trp Ser Ile
                35 40 45
Val Arg Arg Phe Asp Lys Pro Gln Thr Tyr Lys His Phe Ile Lys Ser
        50 55 60
Cys Ser Val Glu Gln Asn Phe Glu Met Arg Val Gly Cys Thr Arg Asp
65 70 75 80
Val Ile Val Ile Ser Gly Leu Pro Ala Asn Thr Ser Thr Glu Arg Leu
                                85 90 95
Asp Ile Leu Asp Asp Glu Arg Arg Val Thr Gly Phe Ser Ile Ile Gly
                        100 105 110
Gly Glu His Arg Leu Thr Asn Tyr Lys Ser Val Thr Thr Val His Arg
                115 120 125
Phe Glu Lys Glu Asn Arg Ile Trp Thr Val Val Leu Glu Ser Tyr Val
        130 135 140
Val Asp Met Pro Glu Gly Asn Ser Glu Asp Asp Thr Arg Met Phe Ala
145 150 155 160
Asp Thr Val Val Lys Leu Asn Leu Gln Lys Leu Ala Thr Val Ala Glu
                                165 170 175
Ala Met Ala Arg Asn Ser Gly Asp Gly Ser Gly Ser Gln Val Thr
                        180 185 190
```

[0089] For position F61 (corresponding to the position in SEQ ID NO:1), hypersensitive mutations will include F61L or F61M. For position V81 (corresponding to the position in SEQ ID NO:1), hypersensitive mutations will include V81I or V81Y. For position I110 (corresponding to the position in SEQ ID NO:1), hypersensitive mutations will include I110C or I110S. As some native PYR/PYL polypeptides have a valine at the position corresponding to I110 of SEQ ID NO:1, in some embodiments where position I110 is mutated, the native amino acid will be valine, subsequently mutated to C or S. For position E141 (corresponding to the position in SEQ ID NO:1), hypersensitive mutations will include E141C, E141I, E141L, E141M, E141N, E141T, E141V, E141W, or E141Y. For position A160 (corresponding to the position in SEQ ID NO:1), hypersensitive mutations will include A160C, A160I or A160V. As some native PYR/PYL polypeptides have a valine at the position corresponding to A160 of SEQ ID NO:1, in some embodiments where position A160 is mutated, the native amino acid will be valine, subsequently mutated to C or I.

[0090] Any of the mutations described herein can be made in any wildtype PYR/PYL polypeptide, for example, in the polypeptides of any of SEQ ID NOs:1-119 or in polypeptides substantially identical to any of SEQ ID NOs:1-119 or comprising any of SEQ ID NOs: 120-123. Analogous amino acid substitutions can be made, for example, in PYR/PYL receptors other than PYR1 by aligning the PYR/PYL receptor polypeptide sequence to be mutated with the PYR1 receptor polypeptide sequence as set forth in SEQ ID NO:1. As a non-limiting example, an amino acid substitution in PYL2 that is analogous to the amino acid substitution V81I in PYR1 as set forth in SEQ ID NO:1 can be determined by aligning the amino acid sequences of PYL2 (SEQ ID NO:3) and PYR1 (SEQ ID NO:1) and identifying position V85 in PYL2 as aligning with amino acid position V81 of PYR1 (SEQ ID NO:1). Analogous amino acid positions in PYR/PYL receptors are shown in FIGS. 2 and 3. As an example, SEQ ID NOS:155-361 represent maize PYR/PYL polypeptides containing the hypersensitive mutations described herein. It will be appreciated that the polypeptides can be further mutated (e.g., with conservative mutations, e.g., outside active sites) without substantially affecting activity. Accordingly, in some embodiments, the hypersensitive polypeptides as described herein comprise a sequence substantially (e.g., at least 70%, 75%, 80%, 85%, 90%, 95%, 98%) identical to the entire sequence of one of SEQ ID NOs: 155-361.

[0091] The extent to which one or more amino acid substitutions in the PYR/PYL receptor activity renders the receptor hypersensitive to ABA can be quantitatively measured, for example by assaying phosphatase activity in the presence of ABA and the PYR/PYL receptor comprising one or more amino acid substitutions and comparing the phosphatase activity to that of a control PYR/PYL receptor. A control PYR/PYL receptor will typically be the wildtype PYR/PYL polypeptide most similar to the mutated a PYR/PYL polypeptide. In some embodiments, e.g., when the starting protein is not a wildtype PYR/PYL polypeptide, the control PYR/PYL polypeptide can be substantially identical (e.g., at least 90, 95, or 98% identical) to the test PYR/PYL polypeptide (i.e., suspected of being hypersensitive) and having the wildtype amino acid at the corresponding position. For example, if the mutant PYR/PYL receptor has a mutation of F61X, where X is any non-F amino acid, the control would have F61 at the same position but would otherwise be identical to the mutant PYR/PYL receptor. If the mutant PYR/PYL receptor has a mutation of V81X, where X is any non-V amino acid, the control would have V81 at the same position but would otherwise be identical to the mutant PYR/PYL receptor. If the mutant PYR/PYL receptor has a mutation of I110X, where X is any non-I, non-V amino acid, the control would have I110 or V at the same position but would otherwise be identical to the mutant PYR/PYL receptor. If the mutant PYR/PYL receptor has a mutation of E141X, where X is any non-E amino acid, the control would have E141 at the same position but would otherwise be identical to the mutant PYR/PYL receptor. If the mutant PYR/PYL receptor has a mutation of A160X, where X is any non-A, non-V amino acid, the control would have A160 or valine at the same position but would otherwise be identical to the mutant PYR/PYL receptor.

[0092] In some embodiments, a mutated PYR/PYL receptor polypeptide comprises two or more amino acid substitutions as described herein. In some embodiments, the two or more amino acid substitutions corresponding to, F61X, V81X, I110X, E141X, and A160X, in PYR1 as set forth in SEQ ID NO:1, where X is the amino acid indicated herein as resulting in hypersensitivity.

[0093] Embodiments of the present invention provide for use of the above proteins and/or nucleic acid sequences, encoding such polypeptides, in the methods and compositions (e.g., expression cassettes, transgenic plants, plants with in situ PYR/PYL modifications, etc.) of the present invention. The isolation of a polynucleotide sequence encoding a plant wild-type PYR/PYL receptor (e.g., from plants where PYR/PYL sequences have not yet been identified) may be accomplished by a number of techniques. For instance, oligonucleotide probes based on the PYR/PYL coding sequences disclosed (e.g., as listed in the SEQUENCE LISTING) here can be used to identify the desired wild-type PYR/PYL gene in a cDNA or genomic DNA library. To construct genomic libraries, large segments of genomic DNA are generated by random fragmentation, e.g., using restriction endonucleases, and are ligated with vector DNA to form concatemers that can be packaged into the appropriate vector. To prepare a cDNA library, mRNA is isolated from the desired tissue, such as a leaf from a particular plant species, and a cDNA library containing the gene transcript of interest is prepared from the mRNA. Alternatively, cDNA may be prepared from mRNA extracted from other tissues in which PYR/PYL gene is expressed.

[0094] The cDNA or genomic library can then be screened using a probe based upon the sequence of a PYR/PYL gene disclosed here. Probes may be used to hybridize with genomic DNA or cDNA sequences to isolate homologous genes in the same or different plant species. Alternatively, antibodies raised against a polypeptide can be used to screen an mRNA expression library.

[0095] Alternatively, the nucleic acids encoding PYR/PYL can be amplified from nucleic acid samples using amplification techniques. For instance, polymerase chain reaction (PCR) technology can be used to amplify the coding sequences of PYR/PYL directly from genomic DNA, from cDNA, from genomic libraries or cDNA libraries. PCR and other in vitro amplification methods may also be useful, for example, to clone polynucleotide sequences encoding PYR/PYL to be expressed, to make nucleic acids to use as probes for detecting the presence of the desired mRNA in samples, for nucleic acid sequencing, or for other purposes. For a general overview of PCR see PCR Protocols: A Guide to Methods and Applications (Innis, M., Gelfand, D., Sninsky, J. and White, T., eds.), Academic Press, San Diego (1990). Appropriate primers and probes for identifying sequences from plant tissues are generated from comparisons of the sequences provided here with other related genes.

[0096] In some embodiments, the partial or entire genome of a number of plants has been sequenced and open reading frames identified. By a BLAST search, one can identify the coding sequence for wild-type PYR/PYL in various plants.

### III. Methods of Making Hypersensitive PYR/PYL Receptor Polypeptides

[0097] In another aspect, the present invention provides for methods of making ABA hypersensitive PYR/PYL receptor polypeptides comprising one or more amino acid substitutions. In some embodiments, the method comprises mutagenizing a wild-type PYR/PYL receptor and determining whether the mutagenized PYR/PYL receptor is hypersensitive to ABA.

[0098] Mutated PYR/PYL receptor polypeptides can be constructed by mutating the DNA sequences that encode the corresponding wild-type PYR/PYL receptor polypeptide (e.g., a wild-type PYR/PYL polypeptide of any of SEQ ID NOs:1-119, having any of SEQ ID NO:s 120-123, or a corresponding variant from which the mutant PYR/PYL receptor polypeptide of the invention is derived), such as by using site-directed or random mutagenesis. Nucleic acid molecules encoding the wild-type PYR/PYL receptor polypeptide can be mutated by a variety of polymerase chain reaction (PCR) techniques well-known to one of ordinary skill in the art. (See, e.g., PCR Strategies (M. A. Innis, D. H. Gelfand, and J. J. Sninsky eds., 1995, Academic Press, San Diego, Calif.) at Chapter 14; PCR Protocols: A Guide to Methods and Applications (M. A. Innis, D. H. Gelfand, J. J. Sninsky, and T. J. White eds., Academic Press, N Y, 1990).

[0099] As a non-limiting example, mutagenesis may be accomplished using site-directed mutagenesis, in which point mutations, insertions, or deletions are made to a DNA template. Kits for site-directed mutagenesis are commercially available, such as the QuikChange Site-Directed Mutagenesis Kit (Stratagene). Briefly, a DNA template to be mutagenized is amplified by PCR according to the manufacturer's instructions using a high-fidelity DNA polymerase (e.g., Pfu Turbo™) and oligonucleotide primers containing the desired mutation. Incorporation of the oligonucleotides generates a mutated plasmid, which can then be transformed into suitable cells (e.g., bacterial or yeast cells) for subsequent screening to confirm mutagenesis of the DNA.

[0100] As another non-limiting example, mutagenesis may be accomplished by means of error-prone PCR amplification (ePCR), which modifies PCR reaction conditions (e.g., using error-prone polymerases, varying magnesium or manganese concentration, or providing unbalanced dNTP ratios) in order to promote increased rates of error in DNA replication. Kits for ePCR mutagenesis are commercially available, such as the GeneMorph® PCR Mutagenesis kit (Stratagene) and Diversify® PCR Random Mutagenesis Kit (Clontech). Briefly, DNA polymerase (e.g., Taq polymerase), salt (e.g., MgCl2, MgSO4, or MnSO4), dNTPs in unbalanced ratios, reaction buffer, and DNA template are combined and subjected to standard PCR amplification according to manufacturer's instructions. Following ePCR amplification, the reaction products are cloned into a suitable vector to construct a mutagenized library, which can then be transformed into suitable cells (e.g., yeast cells) for subsequent screening (e.g., via a two-hybrid screen) as described below.

[0101] Alternatively, mutagenesis can be accomplished by recombination (i.e. DNA shuffling). Briefly, a shuffled mutant library is generated through DNA shuffling using in vitro homologous recombination by random fragmentation of a parent DNA followed by reassembly using PCR, resulting in randomly introduced point mutations. Methods of performing DNA shuffling are known in the art (see, e.g., Stebel, S. C. et al., Methods Mol Biol 352:167-190 (2007)).

[0102] Optionally, multiple rounds of mutagenesis may be performed in order to improve the efficiency of mutant proteins isolated. Thus, in some embodiments, PYR/PYL mutants isolated from ePCR and subsequent screening may be pooled and used as templates for later rounds of mutagenesis.

[0103] In some embodiments, the variants are generated by exposing a plant of plant seeds or cells to a mutagen selecting the plant or cell carrying a hypersensitive PYR/PYL polypeptide as described herein by phenotype or genotype. Examples of mutagens include, e.g., chemical mutagens (e.g., EMS) or radiological mutagens. Variants having a desired mutation can be selected based on phenotype of genotype (e.g., by using TILLING techniques).

[0104] In some embodiments, the method comprises mutagenizing a wild-type PYR/PYL receptor in situ and determining whether the mutagenized PYR/PYL receptor is hypersensitive to ABA. Mutated PYR/PYL receptor polypeptides can be constructed by mutating the DNA sequences that encode the corresponding wild-type PYR/PYL receptor polypeptide (e.g., a wild-type PYR/PYL polypeptide of any of SEQ ID NOs:1-119, having any of SEQ ID NO:s 120-123, or a corresponding variant from which the mutant PYR/PYL receptor polypeptide of the invention is derived), such as by using site-directed or random mutagenesis.

### IV. Screening for Hypersensitive PYR/PYL Receptor Polypeptides

[0105] The hypersensitivity of the mutant PYR/PYL receptors described herein can be measured in several alternative ways. When expressed in yeast, most wild-type PYR/PYL receptors will only bind to the type 2 protein phosphatase (PP2C) HAB1 (or other PP2Cs) when the appropriate yeast cells are grown in the presence of ABA. Thus, in some embodiments, hypersensitivity can be measured by determining the ability of a PYR/PYL mutant receptor, expressed in yeast, to bind to and inactivate PP2C in yeast to a greater extent than a control PYR/PYL receptor expressed in yeast. In some embodiments, the hypersensitive mutant PYR/PYL receptor comprises mutations that result in the mutated receptor inhibiting the activity of the PP2C in a phosphatase assay in the presence of ABA at least about 10%, at least about 20%, at least about 30%, at least about 40%, at least about 50%, at least about 60%, at least about 70%, at least about 80% or more as compared to a wild-type or other control PYR/PYL receptor in the presence of the same concentration of ABA. Several test concentrations ranging from low nM to low μM could be conducted to infer IC₅₀ values and the IC₅₀ values of hypersensitive mutants are substantially lower than appropriate wild type controls.

[0106] Alternatively, cell-based or plant-based methods of screening can be used. For example, cells that naturally express a wild-type PYR/PYL receptor polypeptide or that recombinantly express a wild-type or mutated PYR/PYL receptor polypeptide can be used. In some embodiments, the cells used are plant cells, animal cells, bacterial cells, fungal cells, including but not limited to yeast cells, insect cells, or mammalian cells. In general terms, the screening methods involve comparing the activity of a mutated PYR/PYL receptor polypeptide to the activity of a wild-type PYR/PYL receptor polypeptide in the presence of ABA, e.g., by comparing ABA-regulated gene expression in the wild-type and mutant PYR/PYL receptor-expressing cells or plants.

[0107] One exemplary assay involves testing whether a mutated PYR/PYL receptor can bind to a type 2 protein phosphatase (PP2C) (e.g., Homology to ABI1 (HAB1)) in the presence of ABA. Binding assays can involve contacting a mutated PYR/PY1 receptor polypeptide with a PP2C and allowing sufficient time for the PYR/PYL receptor and PP2C to form a binding complex. Any binding complexes formed can be detected using any of a number of established analytical techniques. Protein binding assays include, but are not limited to, methods that measure co-precipitation or co-migration on non-denaturing SDS-polyacrylamide gels, and co-migration on Western blots (see, e.g., Bennet, J. P. and Yamamura, H. I. (1985) “Neurotransmitter, Hormone or Drug Receptor Binding Methods,” in Neurotransmitter Receptor Binding (Yamamura, H. I., et al., eds.), pp. 61-89. Other binding assays involve the use of mass spectrometry or NMR techniques to identify molecules bound to the PYR/PYL polypeptide. The PYR/PYL polypeptide protein utilized in such assays can be naturally expressed, cloned or synthesized.

[0108] In some embodiments, mammalian or yeast two-hybrid approaches (see, e.g., Bartel, P. L. et. al. Methods Enzymol, 254:241 (1995)) can be used to identify polypeptides or other molecules that interact or bind when expressed together in a cell. In some embodiments, a hypersensitive PYR/PYL polypeptide is identified in a two-hybrid assay between a PYR/PYL polypeptide and a PP2C polypeptide, wherein the PYR/PYL polypeptide and the PP2C bind in the presence of ABA.

[0109] In another exemplary assay, the level of basal activity of a mutated PYR/PYL receptor polypeptide (i.e., level of activity in the absence of ABA) can be determined using an enzymatic phosphatase assay, in which the PYR/PYL receptor and PP2C are incubated in the presence of ABA. In this type of assay, a decrease in phosphatase activity in the presence of ABA to a greater extent than occurred for a control PYR/PYL receptor is indicative of hypersensitive PYR/PYL receptor. A decrease in phosphatase activity can be determined and quantified using any detection reagent known in the art, e.g., a colorimetric detection reagent such as para-nitrophenylphosphate.

[0110] Hypersensitive PYR/PYL receptor polypeptides that are initially identified by any of the foregoing screening methods can be further tested to validate the apparent activity and/or determine other biological effects of the hypersensitive PYR/PYL receptor polypeptide. In some cases, the PYR/PYL receptor polypeptide is tested for the ability to affect plant stress (e.g., drought tolerance and/or high salt tolerance), seed germination, or another phenotype affected by ABA. A number of such assays and phenotypes are known in the art and can be employed according to the methods of the invention.

### V. Recombinant Expression Vectors

[0111] Once a polynucleotide encoding a mutated PYR/PYL receptor polypeptide is obtained, it can also be used to prepare an expression cassette for expressing the mutated PYR/PYL receptor polypeptide in a transgenic plant, directed by a heterologous promoter. Increased expression of mutated PYR/PYL polynucleotide is useful, for example, to produce plants that selectively activate PYR/PYL receptors, thus enhancing stress tolerance.

[0112] Any of a number of means well known in the art can be used to drive mutated PYR/PYL activity or expression in plants. Any organ can be targeted, such as shoot vegetative organs/structures (e.g. leaves, stems and tubers), roots, flowers and floral organs/structures (e.g. bracts, sepals, petals, stamens, carpels, anthers and ovules), seed (including embryo, endosperm, and seed coat) and fruit. Alternatively, the mutated PYR/PYL polynucleotide can be expressed specifically in certain cell and/or tissue types within one or more organs (e.g., guard cells in leaves using a guard cell-specific promoter). Alternatively, the mutated PYR/PYL polynucleotide can be expressed constitutively (e.g., using the CaMV 35S promoter).

[0113] To use a polynucleotide sequence for a mutated PYR/PYL receptor polypeptide in the above techniques, recombinant DNA vectors suitable for transformation of plant cells are prepared. Techniques for transforming a wide variety of higher plant species are well known and described in the technical and scientific literature. See, e.g., Weising et al. Ann. Rev. Genet. 22:421-477 (1988). A DNA sequence coding for the mutated PYR/PYL receptor polypeptide preferably will be combined with transcriptional and translational initiation regulatory sequences which will direct the transcription of the sequence from the gene in the intended tissues of the transformed plant.

[0114] For example, a plant promoter fragment may be employed to direct expression of the mutated PYR/PYL polynucleotide in all tissues of a regenerated plant. Such promoters are referred to herein as “constitutive” promoters and are active under most environmental conditions and states of development or cell differentiation. Examples of constitutive promoters include the cauliflower mosaic virus (CaMV) 35S transcription initiation region, the 1′- or 2′-promoter derived from T-DNA of Agrobacterium tumafaciens, and other transcription initiation regions from various plant genes known to those of skill.

[0115] Alternatively, the plant promoter may direct expression of the mutated PYR/PYL receptor protein in a specific tissue (tissue-specific promoters) or may be otherwise under more precise environmental control (inducible promoters). Examples of tissue-specific promoters under developmental control include promoters that initiate transcription only in certain tissues, such as leaves or guard cells (including but not limited to those described in WO 2005/085449; U.S. Pat. No. 6,653,535; Li et al., Sci China C Life Sci. 2005 April; 48(2):181-6; Husebye, et al., Plant Physiol, April 2002, Vol. 128, pp. 1180-1188; and Plesch, et al., Gene, Volume 249, Number 1, 16 May 2000, pp. 83-89(7)). Examples of environmental conditions that may affect transcription by inducible promoters include anaerobic conditions, elevated temperature, or the presence of light.

[0116] If proper protein expression is desired, a polyadenylation region at the 3′-end of the coding region should be included. The polyadenylation region can be derived from a naturally occurring PYR/PYL gene, from a variety of other plant genes, or from T-DNA.

[0117] The vector comprising the sequences (e.g., promoters or PYR/PYL coding regions) will typically comprise a marker gene that confers a selectable phenotype on plant cells. For example, the marker may encode biocide resistance, particularly antibiotic resistance, such as resistance to kanamycin, G418, bleomycin, hygromycin, or herbicide resistance, such as resistance to chlorosluforon or Basta.

[0118] In some embodiments, the mutated PYR/PYL nucleic acid sequence is expressed recombinantly in plant cells. A variety of different expression constructs, such as expression cassettes and vectors suitable for transformation of plant cells, can be prepared. Techniques for transforming a wide variety of higher plant species are well known and described in the technical and scientific literature. See, e.g., Weising et al. Ann. Rev. Genet. 22:421-477 (1988). A DNA sequence coding for a PYR/PYL protein can be combined with cis-acting (promoter) and trans-acting (enhancer) transcriptional regulatory sequences to direct the timing, tissue type and levels of transcription in the intended tissues of the transformed plant. Translational control elements can also be used.

[0119] Embodiments of the present invention also provide for a mutated PYR/PYL nucleic acid operably linked to a promoter which, in some embodiments, is capable of driving the transcription of the PYR/PYL coding sequence in plants. The promoter can be, e.g., derived from plant or viral sources. The promoter can be, e.g., constitutively active, inducible, or tissue specific. In construction of recombinant expression cassettes, vectors, transgenics, of the invention, a different promoters can be chosen and employed to differentially direct gene expression, e.g., in some or all tissues of a plant or animal.

### Constitutive Promoters

[0120] A fragment can be employed to direct expression of a mutated PYR/PYL nucleic acid in all transformed cells or tissues, e.g., as those of a regenerated plant. The term “constitutive regulatory element” means a regulatory element that confers a level of expression upon an operatively linked nucleic molecule that is relatively independent of the cell or tissue type in which the constitutive regulatory element is expressed. A constitutive regulatory element that is expressed in a plant generally is widely expressed in a large number of cell and tissue types. Promoters that drive expression continuously under physiological conditions are referred to as “constitutive” promoters and are active under most environmental conditions and states of development or cell differentiation.

[0121] A variety of constitutive regulatory elements useful for ectopic expression in a transgenic plant are well known in the art. The cauliflower mosaic virus 35S (CaMV 35S) promoter, for example, is a well-characterized constitutive regulatory element that produces a high level of expression in all plant tissues (Odell et al., Nature 313:810-812 (1985)). The CaMV 35S promoter can be particularly useful due to its activity in numerous diverse plant species (Benfey and Chua, Science 250:959-966 (1990); Futterer et al., Physiol. Plant 79:154 (1990); Odell et al., supra, 1985). A tandem 35S promoter, in which the intrinsic promoter element has been duplicated, confers higher expression levels in comparison to the unmodified 35S promoter (Kay et al., Science 236:1299 (1987)). Other useful constitutive regulatory elements include, for example, the cauliflower mosaic virus 19S promoter; the Figwort mosaic virus promoter; and the nopaline synthase (nos) gene promoter (Singer et al., Plant Mol. Biol. 14:433 (1990); An, Plant Physiol. 81:86 (1986)).

[0122] Additional constitutive regulatory elements including those for efficient expression in monocots also are known in the art, for example, the pEmu promoter and promoters based on the rice Actin-1 5′ region (Last et al., Theor. Appl. Genet. 81:581 (1991); Mcelroy et al., Mol. Gen. Genet. 231:150 (1991); Mcelroy et al., Plant Cell 2:163 (1990)). Chimeric regulatory elements, which combine elements from different genes, also can be useful for ectopically expressing a nucleic acid molecule encoding a mutated PYR/PYL receptor protein (Comai et al., Plant Mol. Biol. 15:373 (1990)).

[0123] Other examples of constitutive promoters include the 1′- or 2′-promoter derived from T-DNA of Agrobacterium tumafaciens (see, e.g., Mengiste (1997) supra; O'Grady (1995) Plant Mol. Biol. 29:99-108); actin promoters, such as the Arabidopsis actin gene promoter (see, e.g., Huang (1997) Plant Mol. Biol. 1997 33:125-139); alcohol dehydrogenase (Adh) gene promoters (see, e.g., Millar (1996) Plant Mol. Biol. 31:897-904); ACT11 from Arabidopsis (Huang et al. Plant Mol. Biol. 33:125-139 (1996)), Cat3 from Arabidopsis (GenBank No. U43147, Zhong et al., Mol. Gen. Genet. 251:196-203 (1996)), the gene encoding stearoyl-acyl carrier protein desaturase from Brassica napus (Genbank No. X74782, Solocombe et al. Plant Physiol. 104:1167-1176 (1994)), GPc1 from maize (GenBank No. X15596, Martinez et al. J. Mol. Biol 208:551-565 (1989)), Gpc2 from maize (GenBank No. U45855, Manjunath et al., Plant Mol. Biol. 33:97-112 (1997)), other transcription initiation regions from various plant genes known to those of skill. See also Holtorf Plant Mol. Biol. 29:637-646 (1995).

### Inducible Promoters

[0124] Alternatively, a plant promoter may direct expression of the mutated PYR/PYL polynucleotide under the influence of changing environmental conditions or developmental conditions. Examples of environmental conditions that may affect transcription by inducible promoters include anaerobic conditions, elevated temperature, drought, or the presence of light. Such promoters are referred to herein as “inducible” promoters. In some embodiments, an inducible promoter is one that is induced by one or more environmental stressors, including but not limited to, drought, freezing cold, and high salt. For example, the invention can incorporate a drought-specific promoter such as a drought-inducible promoter of maize (e.g., the maize rab17 drought-inducible promoter (Vilardell et al. (1991) Plant Mol. Biol. 17:985-993; Vilardell et al. (1994) Plant Mol. Biol. 24:561-569)); or alternatively a cold, drought, and high salt inducible promoter from potato (Kirch (1997) Plant Mol. Biol. 33:897-909) or from Arabidopsis (e.g., the rd29A promoter (Kasuga et al. (1999) Nature Biotechnology 17:287-291). Other environmental stress-inducible promoters include promoters from the following genes: Rab21, Wsi18, Lea3, Uge1, Dip1, and R1G1B in rice (Yi et al. (2010) Planta 232:743-754).

[0125] In some embodiments, a plant promoter is a stress-inducible promoter (e.g., a drought-, cold-, or salt-inducible promoter) that comprises a dehydration-responsive element (DRE) and/or an ABA-responsive element (ABRE), including but not limited to the rd29A promoter.

[0126] Alternatively, plant promoters which are inducible upon exposure to plant hormones, such as auxins, are used to express the mutated PYR/PYL polynucleotide. For example, the invention can use the auxin-response elements E1 promoter fragment (AuxREs) in the soybean (Glycine max L.) (Liu (1997) Plant Physiol. 115:397-407); the auxin-responsive Arabidopsis GST6 promoter (also responsive to salicylic acid and hydrogen peroxide) (Chen (1996) Plant J. 10: 955-966); the auxin-inducible parC promoter from tobacco (Sakai (1996) 37:906-913); a plant biotin response element (Streit (1997) Mol. Plant Microbe Interact. 10:933-937); and, the promoter responsive to the stress hormone abscisic acid (Sheen (1996) Science 274:1900-1902).

[0127] Plant promoters inducible upon exposure to chemicals reagents that may be applied to the plant, such as herbicides or antibiotics, are also useful for expressing the mutated PYR/PYL polynucleotide. For example, the maize In2-2 promoter, activated by benzenesulfonamide herbicide safeners, can be used (De Veylder (1997) Plant Cell Physiol. 38:568-577); application of different herbicide safeners induces distinct gene expression patterns, including expression in the root, hydathodes, and the shoot apical meristem. A PYR/PYL coding sequence can also be under the control of, e.g., a tetracycline-inducible promoter, e.g., as described with transgenic tobacco plants containing the Avena sativa L. (oat) arginine decarboxylase gene (Masgrau (1997) Plant J. 11:465-473); or, a salicylic acid-responsive element (Stange (1997) Plant 11:1315-1324; Uknes et al., Plant Cell 5:159-169 (1993); Bi et al., Plant J. 8:235-245 (1995)).

[0128] Examples of useful inducible regulatory elements include copper-inducible regulatory elements (Mett et al., Proc. Natl. Acad. Sci. USA 90:4567-4571 (1993); Furst et al., Cell 55:705-717 (1988)); tetracycline and chlor-tetracycline-inducible regulatory elements (Gatz et al., Plant J. 2:397-404 (1992); Roder et al., Mol. Gen. Genet. 243:32-38 (1994); Gatz, Meth. Cell Biol. 50:411-424 (1995)); ecdysone inducible regulatory elements (Christopherson et al., Proc. Natl. Acad. Sci. USA 89:6314-6318 (1992); Kreutzweiser et al., Ecotoxicol. Environ. Safety 28:14-24 (1994)); heat shock inducible regulatory elements (Takahashi et al., Plant Physiol. 99:383-390 (1992); Yabe et al., Plant Cell Physiol. 35:1207-1219 (1994); Ueda et al., Mol. Gen. Genet. 250:533-539 (1996)); and lac operon elements, which are used in combination with a constitutively expressed lac repressor to confer, for example, IPTG-inducible expression (Wilde et al., EMBO J. 11:1251-1259 (1992)). An inducible regulatory element useful in the transgenic plants of the invention also can be, for example, a nitrate-inducible promoter derived from the spinach nitrite reductase gene (Back et al., Plant Mol. Biol. 17:9 (1991)) or a light-inducible promoter, such as that associated with the small subunit of RuBP carboxylase or the LHCP gene families (Feinbaum et al., Mol. Gen. Genet. 226:449 (1991); Lam and Chua, Science 248:471 (1990)).

### Tissue-Specific Promoters

[0129] Alternatively, the plant promoter may direct expression of the mutated PYR/PYL polynucleotide in a specific tissue (tissue-specific promoters). Tissue specific promoters are transcriptional control elements that are only active in particular cells or tissues at specific times during plant development, such as in vegetative tissues or reproductive tissues.

[0130] Examples of tissue-specific promoters under developmental control include promoters that initiate transcription only (or primarily only) in certain tissues, such as vegetative tissues, e.g., roots or leaves, or reproductive tissues, such as fruit, ovules, seeds, pollen, pistols, flowers, or any embryonic tissue, or epidermis or mesophyll. Reproductive tissue-specific promoters may be, e.g., ovule-specific, embryo-specific, endosperm-specific, integument-specific, seed and seed coat-specific, pollen-specific, petal-specific, sepal-specific, or some combination thereof. In some embodiments, the promoter is cell-type specific, e.g., guard cell-specific.

[0131] Epidermal-specific promoters include, for example, the Arabidopsis LTP1 promoter (Thoma et al. (1994) Plant Physiol. 105(1):35-45), the CER1 promoter (Aarts et al. (1995) Plant Cell 7:2115-27), and the CER6 promoter (Hooker et al. (2002) Plant Physiol 129:1568-80), and the orthologous tomato LeCER6 (Vogg et al. (2004) J. Exp Bot. 55:1401-10).

[0132] Guard cell-specific promoters include, for example, the DGP1 promoter (Li et al. (2005) Science China C Life Sci. 48:181-186).

[0133] Other tissue-specific promoters include seed promoters. Suitable seed-specific promoters are derived from the following genes: MAC1 from maize (Sheridan (1996) Genetics 142:1009-1020); Cat3 from maize (GenBank No. L05934, Abler (1993) Plant Mol. Biol. 22:10131-1038); vivparous-1 from Arabidopsis (Genbank No. U93215); atmyc1 from Arabidopsis (Urao (1996) Plant Mol. Biol. 32:571-57; Conceicao (1994) Plant 5:493-505); napA from Brassica napus (GenBank No. J02798, Josefsson (1987) JBL 26:12196-1301); and the napin gene family from Brassica napus (Sjodahl (1995) Planta 197:264-271).

[0134] A variety of promoters specifically active in vegetative tissues, such as leaves, stems, roots and tubers, can also be used to express polynucleotides encoding mutated PYR/PYL receptor polypeptides. For example, promoters controlling patatin, the major storage protein of the potato tuber, can be used, see, e.g., Kim (1994) Plant Mol. Biol. 26:603-615; Martin (1997) Plant J. 11:53-62. The ORF13 promoter from Agrobacterium rhizogenes that exhibits high activity in roots can also be used (Hansen (1997) Mol. Gen. Genet. 254:337-343. Other useful vegetative tissue-specific promoters include: the tarin promoter of the gene encoding a globulin from a major taro (Colocasia esculenta L. Schott) corm protein family, tarin (Bezerra (1995) Plant Mol. Biol. 28:137-144); the curculin promoter active during taro corm development (de Castro (1992) Plant Cell 4:1549-1559) and the promoter for the tobacco root-specific gene TobRB7, whose expression is localized to root meristem and immature central cylinder regions (Yamamoto (1991) Plant Cell 3:371-382).

[0135] Leaf-specific promoters, such as the ribulose biphosphate carboxylase (RBCS) promoters, can also be used. For example, the tomato RBCS1, RBCS2 and RBCS3A genes are expressed in leaves and light-grown seedlings, only RBCS1 and RBCS2 are expressed in developing tomato fruits (Meier (1997) FEBS Lett. 415:91-95). A ribulose bisphosphate carboxylase promoters expressed almost exclusively in mesophyll cells in leaf blades and leaf sheaths at high levels, described by Matsuoka (1994) Plant J. 6:311-319, can be used. Another leaf-specific promoter is the light harvesting chlorophyll a/b binding protein gene promoter, see, e.g., Shiina (1997) Plant Physiol. 115:477-483; Casal (1998) Plant Physiol. 116:1533-1538. The Arabidopsis thaliana myb-related gene promoter (Atmyb5) described by Li (1996) FEBS Lett. 379:117-121, is leaf-specific. The Atmyb5 promoter is expressed in developing leaf trichomes, stipules, and epidermal cells on the margins of young rosette and cauline leaves, and in immature seeds. Atmyb5 mRNA appears between fertilization and the 16 cell stage of embryo development and persists beyond the heart stage. A leaf promoter identified in maize by Busk (1997) Plant J. 11:1285-1295, can also be used.

[0136] Another class of useful vegetative tissue-specific promoters are meristematic (root tip and shoot apex) promoters. For example, the “SHOOTMERISTEMLESS” and “SCARECROW” promoters, which are active in the developing shoot or root apical meristems, described by Di Laurenzio (1996) Cell 86:423-433; and, Long (1996) Nature 379:66-69; can be used. Another useful promoter is that which controls the expression of 3-hydroxy-3-methylglutaryl coenzyme A reductase HMG2 gene, whose expression is restricted to meristematic and floral (secretory zone of the stigma, mature pollen grains, gynoecium vascular tissue, and fertilized ovules) tissues (see, e.g., Enjuto (1995) Plant Cell. 7:517-527). Also useful are kn1-related genes from maize and other species which show meristem-specific expression, see, e.g., Granger (1996) Plant Mol. Biol. 31:373-378; Kerstetter (1994) Plant Cell 6:1877-1887; Hake (1995) Philos. Trans. R. Soc. Lond. B. Biol. Sci. 350:45-51. For example, the Arabidopsis thaliana KNAT1 promoter (see, e.g., Lincoln (1994) Plant Cell 6:1859-1876).

[0137] One of skill will recognize that a tissue-specific promoter may drive expression of operably linked sequences in tissues other than the target tissue. Thus, as used herein a tissue-specific promoter is one that drives expression preferentially in the target tissue, but may also lead to some expression in other tissues as well.

[0138] In another embodiment, the mutated PYR/PYL polynucleotide is expressed through a transposable element. This allows for constitutive, yet periodic and infrequent expression of the constitutively active polypeptide. The invention also provides for use of tissue-specific promoters derived from viruses including, e.g., the tobamovirus subgenomic promoter (Kumagai (1995) Proc. Natl. Acad. Sci. USA 92:1679-1683; the rice tungro bacilliform virus (RTBV), which replicates only in phloem cells in infected rice plants, with its promoter which drives strong phloem-specific reporter gene expression; the cassava vein mosaic virus (CVMV) promoter, with highest activity in vascular elements, in leaf mesophyll cells, and in root tips (Verdaguer (1996) Plant Mol. Biol. 31:1129-1139).

### VI. Production of Plants Comprising Hypersensitive Mutations

[0139] In another aspect, the present invention provides for transgenic plants comprising recombinant expression cassettes for expressing a hypersensitive PYR/PYL receptor protein as described herein in a plant. In some embodiments, a transgenic plant is generated that contains a complete or partial sequence of a polynucleotide that is derived from a species other than the species of the transgenic plant. It should be recognized that transgenic plants encompass the plant or plant cell in which the expression cassette is introduced as well as progeny of such plants or plant cells that contain the expression cassette, including the progeny that have the expression cassette stably integrated in a chromosome.

[0140] A recombinant expression vector comprising a PYR/PYL coding sequence driven by a heterologous promoter may be introduced into the genome of the desired plant host by a variety of conventional techniques. For example, the DNA construct may be introduced directly into the genomic DNA of the plant cell using techniques such as electroporation and microinjection of plant cell protoplasts, or the DNA construct can be introduced directly to plant tissue using ballistic methods, such as DNA particle bombardment. Alternatively, the DNA construct may be combined with suitable T-DNA flanking regions and introduced into a conventional Agrobacterium tumefaciens host vector. The virulence functions of the Agrobacterium tumefaciens host will direct the insertion of the construct and adjacent marker into the plant cell DNA when the cell is infected by the bacteria. While transient expression of the constitutively active PYR/PYL receptor is encompassed by the invention, generally expression of construction of the invention will be from insertion of expression cassettes into the plant genome, e.g., such that at least some plant offspring also contain the integrated expression cassette.

[0141] Microinjection techniques are also useful for this purpose. These techniques are well known in the art and thoroughly described in the literature. The introduction of DNA constructs using polyethylene glycol precipitation is described in Paszkowski et al. EMBO 1 3:2717-2722 (1984). Electroporation techniques are described in Fromm et al. Proc. Natl. Acad. Sci. USA 82:5824 (1985). Ballistic transformation techniques are described in Klein et al. Nature 327:70-73 (1987).

[0142] Agrobacterium tumefaciens-mediated transformation techniques, including disarming and use of binary vectors, are well described in the scientific literature. See, for example, Horsch et al. Science 233:496-498 (1984), and Fraley et al. Proc. Natl. Acad. Sci. USA 80:4803 (1983).

[0143] Transformed plant cells derived by any of the above transformation techniques can be cultured to regenerate a whole plant that possesses the transformed genotype and thus the desired phenotype such as enhanced abiotic stress resistance. Such regeneration techniques rely on manipulation of certain phytohormones in a tissue culture growth medium, typically relying on a biocide and/or herbicide marker which has been introduced together with the desired nucleotide sequences. Plant regeneration from cultured protoplasts is described in Evans et al., Protoplasts Isolation and Culture, Handbook of Plant Cell Culture, pp. 124-176, MacMillilan Publishing Company, New York, 1983; and Binding, Regeneration of Plants, Plant Protoplasts, pp. 21-73, CRC Press, Boca Raton, 1985. Regeneration can also be obtained from plant callus, explants, organs, or parts thereof. Such regeneration techniques are described generally in Klee et al. Ann. Rev. of Plant Phys. 38:467-486 (1987).

[0144] One of skill will recognize that after the expression cassette is stably incorporated in transgenic plants and confirmed to be operable, it can be introduced into other plants by sexual crossing. Any of a number of standard breeding techniques can be used, depending upon the species to be crossed.

[0145] The expression cassettes of the invention can be used to confer abiotic stress resistance on essentially any plant. Thus, the invention has use over a broad range of plants, including species from the genera Asparagus, Atropa, Avena, Brassica, Citrus, Citrullus, Capsicum, Cucumis, Cucurbita, Daucus, Fragaria, Glycine, Gossypium, Helianthus, Heterocallis, Hordeum, Hyoscyamus, Lactuca, Linum, Lolium, Lycopersicon, Malus, Manihot, Majorana, Medicago, Nicotiana, Oryza, Panieum, Pannesetum, Persea, Pisum, Pyrus, Prunus, Raphanus, Secale, Senecio, Sinapis, Solanum, Sorghum, Trigonella, Triticum, Vitis, Vigna, and, Zea. In some embodiments, the plant is selected from the group consisting of rice, maize, wheat, soybeans, cotton, canola, turfgrass, and alfalfa. In some embodiments, the plant is an ornamental plant. In some embodiment, the plant is a vegetable- or fruit-producing plant.

[0146] Those of skill will recognize that a number of plant species can be used as models to predict the phenotypic effects of transgene expression in other plants. For example, it is well recognized that both tobacco (Nicotiana) and Arabidopsis plants are useful models of transgene expression, particularly in other dicots.

[0147] In some embodiments, the plants of the invention have enhanced ABA-mediated phenotypes, for example enhanced seed dormancy, as compared to plants that are otherwise identical except for expression of the hypersensitive PYR/PYL receptor polypeptide. Those of skill in the art will recognize that ABA is a well-studied plant hormone and that ABA mediates many changes in characteristics, any of which can be monitored to determine changes in phenotype. In some embodiments, an enhanced ABA-mediated phenotype is manifested by altered timing of seed germination or altered stress (e.g., drought, freezing cold, and/or salt) tolerance.

[0148] Abiotic stress resistance can be assayed according to any of a number of well-known techniques. For example, for drought tolerance, plants can be grown under conditions in which less than optimum water is provided to the plant. Drought resistance can be determined by any of a number of standard measures including turgor pressure, growth, yield, and the like. In some embodiments, a transgenic plant expressing a mutated PYR/PYL receptor as described herein has enhanced drought tolerance if the loss of turgor in the transgenic plant is reduced by at least about 10%, 15%, 20%, 25%, 30%, 40%, 50%, 60%, 70%, 80%, 90%, or more as compared to a non-transgenic control plant over a defined period of time (e.g., over the course of 5, 6, 7, 8, 9, 10, 11, 12, 13, 14 days or more, e.g., 3, 4, 5 weeks or more).

[0149] In some embodiments, the enhanced ABA-mediated phenotype is enhanced tolerance to moderate or high salinity. Salinity tolerance can be determined by any of a number of standard measures, including germination, growth, yield, or plant survival, leaf injury, premature loss of chlorophyll, and the like. In some embodiments, transgenic plants expressing a mutated PYR/PYL receptor as described herein have enhanced salt tolerance if the survival of the transgenic plants under moderate-salt or high-salt conditions (e.g., about 50 mM, 100 mM, 150 mM, 200 mM, 250 mM, 300 mM NaCl or higher) is increased by at least about 10%, 15%, 20%, 25%, 30%, 40%, 50%, 60%, 70%, 80%, 90%, or more as compared to a non-transgenic control plant over a defined period of time (e.g., over the course of 5, 6, 7, 8, 9, 10, 11, 12, 13, 14 days or more, e.g., 3, 4, 5 weeks or more).

[0150] Plant gene manipulations can now be precisely tailored in non-transgenic organisms using the CRISPR/Cas9 genome editing method. In this bacterial antiviral and transcriptional regulatory system, a complex of two small RNAs—the CRISPR-RNA (crRNA) and the trans-activating crRNA (tracrRNA)—directs the nuclease (Cas9) to a specific DNA sequence complementary to the crRNA (Jinek, M., et al. Science 337, 816-821 (2012)). Binding of these RNAs to Cas9 involves specific sequences and secondary structures in the RNA. The two RNA components can be simplified into a single element, the single guide-RNA (sgRNA), which is transcribed from a cassette containing a target sequence defined by the user (Jinek, M., et al. Science 337, 816-821 (2012)). This system has been used for genome editing in humans, zebrafish, Drosophila, mice, nematodes, bacteria, yeast, and plants (Hsu, P. D., et al., Cell 157, 1262-1278 (2014)). In this system the nuclease creates double stranded breaks at the target region programmed by the sgRNA. These can be repaired by non-homologous recombination, which often yields inactivating mutations. The breaks can also be repaired by homologous recombination, which enables the system to be used for gene targeted gene replacement (Li, J.-F., et al. Nat. Biotechnol. 31, 688-691, 2013; Shan, Q., et al. Nat. Biotechnol. 31, 686-688, 2013). The hypersensitive mutations described in this application can be introduced into plants using the CAS9/CRISPR system.

[0151] Accordingly, in some embodiments, instead of generating a transgenic plant, a native PYR/PYR coding sequence in a plant or plant cell can be altered in situ to generate a plant or plant cell carrying a polynucleotide encoding a hypersensitive PYR/PYL polypeptide as described herein. For example, in some embodiments, CRISPR technology is used to introduce one or more nucleotide changes into a PYR/PYL coding sequence in situ to change the appropriate codon to make a change corresponding to F61X, V81X, I110X, or V163X of SEQ ID NO:1. The CRISPR/Cas system has been modified for use in prokaryotic and eukaryotic systems for genome editing and transcriptional regulation. The “CRISPR/Cas” system refers to a widespread class of bacterial systems for defense against foreign nucleic acid. CRISPR/Cas systems are found in a wide range of eubacterial and archaeal organisms. CRISPR/Cas systems include type I, II, and III sub-types. Wild-type type II CRISPR/Cas systems utilize the RNA-mediated nuclease, Cas9 in complex with guide and activating RNA to recognize and cleave foreign nucleic acid. Cas9 homologs are found in a wide variety of eubacteria, including, but not limited to bacteria of the following taxonomic groups: Actinobacteria, Aquificae, Bacteroidetes-Chlorobi, Chlamydiae-Verrucomicrobia, Chlroflexi, Cyanobacteria, Firmicutes, Proteobacteria, Spirochaetes, and Thermotogae. An exemplary Cas9 protein is the Streptococcus pyogenes Cas9 protein. Additional Cas9 proteins and homologs thereof are described in, e.g., Chylinksi, et al., RNA Biol. 2013 May 1; 10(5): 726-737; Nat. Rev. Microbiol. 2011 June; 9(6): 467-477; Hou, et al., Proc Natl Acad Sci USA. 2013 Sep. 24; 110(39):15644-9; Sampson et al., Nature. 2013 May 9; 497(7448):254-7; and Jinek, et al., Science. 2012 Aug. 17; 337(6096):816-21.

[0152] Accordingly, in one aspect, a method is provided of using CRISPR/CAS9 to introduce at least one of the mutation described herein into a plant cell is performed. In some embodiments, a method of altering a (e.g., native) nucleic acid encoding PYR/PYL polypeptide in a plant is provided. In some embodiments, the method comprises introducing into the plant cell containing and expressing a DNA molecule having a target nucleic acid encoding PYR/PYL polypeptide an engineered, non-naturally occurring Clustered Regularly Interspaced Short Palindromic Repeats (CRISPR)-CRISPR associated (Cas) (CRISPR-Cas) system. In some embodiments, the CRISPR-Cas system comprises one or more vectors comprising: a) a first regulatory element operable in a plant cell operably linked to at least one nucleotide sequence encoding a CRISPR-Cas system guide RNA that hybridizes with the target sequence, and b) a second regulatory element operable in a plant cell operably linked to a nucleotide sequence encoding a Type-II Cas9 protein, wherein components (a) and (b) are located on same or different vectors of the system, whereby the guide RNA targets the target sequence and the Cas9 protein cleaves the DNA molecule, whereby at least one of the hypersensitive mutations described herein is introduced into the target nucleic acid encoding the PYR/PYL polypeptide. In some embodiments, the PRY/PYL polypeptide is selected from any of SEQ ID NO:1, 2, 3, 4, 5, 6, 7, 8, 9, 10, 11, 12, 13, 14, 15, 16, 17, 18, 19, 20, 21, 22, 23, 24, 25, 26, 27, 28, 29, 30, 31, 32, 33, 34, 35, 36, 37, 38, 39, 40, 41, 42, 43, 44, 45, 46, 47, 48, 49, 50, 51, 52, 53, 54, 55, 56, 57, 58, 59, 60, 61, 62, 63, 64, 65, 66, 67, 68, 69, 70, 71, 72, 73, 74, 75, 76, 77, 78, 79, 80, 81, 82, 83, 84, 85, 86, 87, 88, 89, 90, 91, 92, 93, 94, 95, 96, 97, 98, 99, 100, 101, 102, 103, 104, 105, 106, 107, 108, 109, 110, 111, 112, 113, 114, 115, 116, 117, 118, or 119 or a substantially identical polypeptide. In some embodiments, the plant is from a genus selected from Asparagus, Atropa, Avena, Brassica, Citrus, Citrullus, Capsicum, Cucumis, Cucurbita, Daucus, Fragaria, Glycine, Gossypium, Helianthus, Heterocallis, Hordeum, Hyoscyamus, Lactuca, Linum, Lolium, Lycopersicon, Malta, Manihot, Majorana, Medicago, Nicotiana, Oryza, Panieum, Pannesetum, Persea, Pisum, Pyrus, Prunus, Raphanus, Secale, Senecio, Sinapis, Solanum, Sorghum, Trigonella, Triticum, Vitis, Vigna, and, Zea. In some embodiments, the plant is selected from the group consisting of rice, maize, wheat, and soybean. In some embodiments, the hypersensitive mutation introduced to the target nucleic acid is (corresponding to their position in Arabidopsis PYR1 (SEQ ID NO:1)): F61, V81, I110, E141, or A160 or a combination thereof. In some embodiments, no other mutations are introduced into the target nucleic acid. Also provided as a plant or plant cell resulting from the above-described method. Such a plant will contain a non-naturally-occurring nucleic acid sequence encoding the hypersensitive PYR/PYL polypeptide.

### VII. PYR/PYL Fusion Proteins

[0153] In some embodiments, the hypersensitive PYR/PYL polypeptides described herein are provided as fusion proteins, i.e., translational fusions with one or more fusion partner. In some embodiments, a hypersensitive PYR/PYL polypeptide is fused with a transcriptional activation or modulation domain. A non-limiting example of such a domain is VP16 or VP64. The fusion proteins can further comprise a nuclear localization signal sequence such that the fusion protein, when translated in a eukaryotic host cell, is localized to the cell nucleus. Also provided are polynucleotides encoding such fusion proteins as well as host cells comprising and expressing such polynucleotides. The polynucleotides in such instances will be heterologous to the host cell, i.e., will not be naturally occurring, for example transformed into the cell.

[0154] Such fusion proteins are useful, for example, in controlling eukaryotic gene expression in the cell when co-expressed with a sequence-specific DNA binding domain fused with) ABA INSENSITIVE 1 (ABI1) or other proteins having specific binding affinity for PYR/PYL proteins binding ABA. Exemplary sequence-specific DNA binding domains include, but are not limited to zinc-finger proteins, TALENS, transcription factor DNA binding domains, and RNA-guided DNA-binding domains of inactive Cas9 (dCas9). When both fusion proteins are co-expressed in the cell in the presence of ABA, the two fusion proteins will co-localized due to the binding of ABA1 to the ABA-binding PYR/PYL protein, thereby bringing the transcriptional activation or modulation domain in proximity to the target promoter, thereby regulating gene expression. Examples of systems and their use in gene regulation, are described in, e.g., Konermann et al., Nature 500:472-476 (2013) and Liang et al., Science Vol. 4 Issue 164 (2011).

### RNA Directed Genome Modification

[0155] In one aspect provided herein is a method for introducing a mutation in situ at a PYR/PYL mutation target site in a plant cell genome, as described herein. For example, in some embodiments, the PYR/PYL mutation target site comprises a nucleic acid that encodes for V89 of PYL-E or E149 of PYL. In certain embodiments the method comprises introducing into the plant cell: 1) a CRISPR ribonucleic acid (crRNA) that includes a sequence substantially identical to SEQ ID NOS: 363, 364, 365, 366, 367 or 369; 2) a transacting ribonucleic acid (tracRNA); 3) a nuclease (e.g., Cas9); and 4) a repair nucleic acid that can undergo homologous recombination that contains the mutation. According to the subject method, the crRNA and tracRNA directs the nuclease to the PYR/PYL mutation target site in a plant cell genome. Upon its recruitment, the nuclease (e.g., Cas9) creates a double strand break at the PYR/PYL mutation target site. The double strand break at the PYR/PYL mutation target site facilitates homologous recombination of the repair nucleic acid containing the mutation with a region of the plant cell genome that includes the PYR/PYL mutation target site, thereby introducing the mutation at the PYR/PYL mutation target site.

[0156] Mutations can be introduced into any suitable plant cell using the subject method. In some embodiments, the plant cell is a plant embryo. In certain embodiments, the plant cell is a maize plant cell.

[0157] Each component of the method can be introduced into the plant cell using any suitable method known in the art. In certain embodiments, the crRNA and tracRNA are introduced into the cell as an expression cassette containing a polynucleotide (i.e., DNA) encoding the crRNA and/or traRNA. In some embodiments, the expression cassette includes an RNA polymerase promoter operably linked to the polynucleotide encoding the crRNA and/or traRNA, thereby allowing transcription of the crRNA and/or traRNA. In some embodiments, the Cas9 is introduced into the cell as an expression vector containing a promoter operably linked to a polynucleotide encoding Cas9. Any suitable promoter can be used, including but not limited to, the promoters described herein. In certain embodiments, the promoter is a ubiquitin-1 promoter (e.g., prUbi-10). DNA construct (e.g., the expression cassettes and vectors described herein) can be introduced directly to plant tissue, for example, using ballistic methods, such as DNA particle bombardment.

[0158] Each of the crRNA, and the tracRNA, nuclease can be introduced separately or together as part of one expression vector into the cell of interest (e.g., a maize plant cell). In certain embodiments, the crRNA and the tracRNA are fused together to create a guide ribonucleic acid (gRNA). In some embodiments, the gRNA includes, from 5′ to 3′, a crNA linked to a tracRNA. In certain embodiments the crRNA, tracRNA, and nuclease (e.g., Cas9) are introduced together as nucleic acid cassettes included in one expression vector. Each component of the subject method is discussed in detail below.

### Guide RNA

[0159] In one aspect provided, provided herein is a guide RNA (gRNA) comprising a CRISPR ribonucleic acid (crRNA) and a transacting RNA (tracRNA).

[0160] The crRNA of the subject gRNA comprises a nucleotide sequence that is complementary to a sequence in a PYR/PYL mutation target site and includes a sequence that is substantially identical to SEQ ID NOS: 363, 364, 365, 366, 367 or 369. In certain embodiments, the crRNA has a sequence that is substantially identical to SEQ ID NOS: 363, 364, 365, 366, 367 or 369. The subject crRNAs provided herein are particularly useful for creating mutations at a PYR/PYL mutation target site that includes a nucleic acid encoding for an amino acid corresponding to V89 (SEQ ID NOS: 363, 364, 365, 366, 367) and E149 (SEQ ID NO:369) of PYL-E. As used herein, a “PYR/PYL mutation target site” refers to a region of a polynucleotide encoding for a PYR/PYL receptor that includes the site where a mutation is introduced by the subject method. The crRNA interacts with the PYR/PYL mutation target site in a sequence-specific manner by hybridization to a sequence in the PYR/PYL mutation target site (e.g., the complementary strand of the PYR/PYL mutation target site) and, together with the tracRNA of the gRNA, recruits Cas9 endonuclease to the PYR/PYL mutation target site. Cas9 endonuclease recruited by the gRNA to the PYR/PYL mutation target site introduces a double strand break in the PYR/PYL mutation target site. Any of the mutations described herein can be made in any wildtype PYR/PYL polypeptide. Analogous amino acid substitutions can be made, for example, in PYR/PYL receptors other than PYL-E by aligning the PYR/PYL receptor polypeptide sequence to be mutated with the PYL-E receptor polypeptide sequence. Analogous amino acid positions in PYR/PYL receptors are shown in FIGS. 2 and 3.

[0161] In some embodiments, the PYR/PYL mutation target site has the sequence of SEQ ID NO: 362, which includes a nucleic acid encoding for V89 of PYL-E. In some embodiments, the PYR/PYL mutation target site has the sequence of SEQ ID NO:368, which includes a nucleic acid encoding for E149 of PYL-E.

[0162] In some embodiments, a crRNA has a length of 10 nucleotides (nt) to 100 nucleotides (nt). In some embodiments, the crRNA has a length of 15, 16, 17, 18, 19, 20, 21, 22, 23, 24, 25, 26, 27, 28, 29, 30 nt and includes a sequence that is substantially identical to SEQ ID NOS: 362, 363, 364, 365, 366 or 368. In some embodiments, the crRNA has a length of at least 17 nt. In some embodiments, the crRNA has a length of 17 nt to 18 nt, 17 nt to 19 nt, 17 nt to 20 nt, 17 nt to 21 nt, 17 nt to 22 nt, 17 nt to 23 nt, 17 nt to 24 nt, 17 nt to 25 nt, 17 nt to 30 nt, 17 nt to 35 nt, 17 nt to 40 nt, 17 nt to 45 nt, 17 nt to 50 nt, 17 nt to 55 nt, 17 nt to 60 nt, 17 nt to 65 nt, 17 nt to 70 nt, 17 nt to 75 nt, 17 nt to 80 nt, 17 nt to 85 nt, 17 nt to 90 nt, 17 nt to 95 nt, or 17 nt to 100 nt. In some embodiments, the crRNA has a length of 12 nt to 25 nt, 13 nt to 25 nt, 14 nt to 25 nt, 15 nt to 25 nt, 16 nt to 25 nt, 17 nt to 25 nt, 18 nt to 25 nt, 19 nt to 25 nt, 20 nt to 25 nt, 21 nt to 25 nt, or 22 nt to 25 nt.

[0163] In some embodiments, the crRNA is 17 nt in length, In some embodiments, the crRNA is 18 nt in length. In some embodiments, the crRNA is 19 nt in length. In some embodiments, the crRNA is 20 nt in length. In some embodiments, the crRNA is 21 nt in length. In some embodiments the crRNA is 22 nt in length. In some embodiments, the crRNA is 23 nt in length. In some embodiments, the crRNA is 24 nt in length. In some embodiments, the crRNA is 25 nt in length.

[0164] In some embodiments, the crRNA is at least 17 nt in length, In some embodiments, the crRNA is at least 18 nt in length. In some embodiments, the crRNA is at least 19 nt in length. In some embodiments, the crRNA is at least 20 nt in length. In some embodiments, the crRNA is at least 21 nt in length. In some embodiments the crRNA is at least 22 nt in length. In some embodiments, the crRNA is at least 23 nt in length. In some embodiments, the crRNA is at least 24 nt in length. In some embodiments, the crRNA is at least 25 nt in length.

[0165] In some embodiments, the guideRNA (gRNA) includes a transacting RNA (tracRNA). Transacting RNA of the subject guideRNA interacts with the crRNA to recruit a nuclease to the site of a PYR/PYL mutation target site. Upon its recruitment to the PYR/PYL mutation target site, the nuclease creates a double strand break (DSB) in the PYR/PYL mutation target site. Any suitable tracRNA capable of recruiting a Cas9 to a PYR/PYL mutation target site can be used with the subject gRNA. In some embodiments, the tracRNA is encoded by a nucleotide having a sequence that is substantially identical to SEQ ID NO: 370. In certain embodiments of the subject method, the tracRNA and the crRNA are introduced into the plant cells separately (e.g., on different expression vectors). In some embodiments, the tracRNA is linked to the crRNA and introduced into the plant cell as a guideRNA (gRNA).

[0166] In another aspect, provided herein is a nucleic acid that includes a polynucleotide encoding any of the subject gRNAs described herein.

[0167] In another aspect, provided herein is an expression cassette that includes an RNA polymerase promoter operably linked to any of the subject gRNAs described herein. Any suitable RNA polymerase promoter capable of driving transcription of the nucleic acid encoding the subject gRNA can be used. In some embodiments, the promoter is an inducible promoter, including, but not limited, to any of the inducible promoters described herein. In other embodiments, the promoter is a constitutive promoter, including, but not limited to any of the constitutive promoters described herein. In yet other embodiments, the promoter is a tissue-specific promoter, including, but not limited to, any of the tissue-specific promoters described herein. In certain embodiments, the RNA polymerase promoter is an RNA polymerase III (polIII) promoter. In particular embodiments, the polIII promoter is a U3 promoter or a U6 promoter. In certain embodiment, the expression cassette has the sequence of any one of SEQ ID NOS; 371-373.

Expression Vectors Including gRNA and Cas9 Nuclease

[0168] In another aspect, provided herein is an expression vector that includes one or more of the guide RNA (gRNA) expression cassettes provided herein and an expression cassette including a promoter operably linked to a polynucleotide encoding a CRISPR-associated endonuclease 9 (Cas9). In some embodiments, the promoter operably linked to the Cas9 is a ubiquitin-1 promoter (prUbi-10). In some embodiments, the expression includes an expression cassette containing a polynucleotide encoding a gRNA having a crRNA that is substantially identical to SEQ ID NOS: 363, 364, 365, 366, 367 (see, e.g., FIG. 5). In some embodiments, the expression vector includes an expression cassette containing a polynucleotide encoding a gRNA having a crRNA that is substantially identical to SEQ ID NOS: 369 (see, e.g., FIG. 6). In some embodiments, the expression vector includes a first expression cassette containing a polynucleotide encoding a gRNA having a crRNA that is substantially identical to SEQ ID NOS: 363, 364, 365, 366, 367; a second expression cassette containing a polynucleotide encoding a gRNA having a crRNA that is substantially identical to SEQ ID NO: 369; and a third expression cassette including a promoter operably linked to a polynucleotide encoding a CRISPR-associated endonuclease 9 (Cas9) (see, e.g., FIG. 7).

### Methods of Producing PYR/PYL Variant Plants Using RNA Directed Genome Modification

[0169] Expression vectors disclosed herein are useful, for example, for introducing a mutation in a plant in situ at a genomic PYR/PYL mutation target site. Thus, in another aspect, provided herein is a method for of producing a plant having a mutation at a genomic PYR/PYL mutation target site. In some embodiments, the method includes introducing into plant cells an expression vector encoding for a gRNA and Cas9 as disclosed herein and at least one repair nucleic acid comprising the mutation of interest. According to the subject method, the crRNA and tracRNA directs the nuclease to the PYR/PYL mutation target site in a plant cell genome. Upon its recruitment, the nuclease (e.g., Cas9) creates a double strand break at the PYR/PYL mutation target site. The double strand break at the PYR/PYL mutation target site facilitates homologous recombination of the repair nucleic acid containing the mutation of interest with a region of the plant cell genome that includes the PYR/PYL mutation target site, thereby introducing the mutation at the PYR/PYL mutation target site. In certain embodiments, the repair nucleic acid has a sequence that is substantially identical to any one of the sequence of SEQ ID NOS:374 to 378. In other embodiments, the repair nucleic acid has a sequence that is complementary to a sequence that is substantially identical to any one of the sequences of SEQ ID NOS:374 to 386. In specific embodiments, the repair nucleic acid has a sequence that is substantially identical to SEQ ID NO:376. In other embodiments, the repair nucleic acid has a sequence that is complementary to a sequence that is substantially identical to SEQ ID NO:376. In another embodiment, the repair nucleic acid has a sequence that is substantially identical to SEQ ID NO:378. In other embodiments, the repair nucleic acid has a sequence that is complementary to a sequence that is substantially identical to SEQ ID NO:378. In yet another embodiment of the method, two repair nucleic acids are introduced, where the repair nucleic acids have sequences that are substantially identical to SEQ ID NO:376 and SEQ ID NO:378. In another embodiment of the method, two repair nucleic acids are introduced, where the repair nucleic acids have sequences are complementary to sequences that are substantially identical to SEQ ID NO:376 and SEQ ID NO:378.

[0170] In certain embodiments, the method further includes the step of selecting plant cells having the mutation. Selection for mutation can be performed by any useful technique known in the art, including, but not limited PCR amplification followed by sequencing, capillary electrophoresis and Nuclease Serveyer assay. In some embodiments, the method is for the production of a maize plant.

[0171] In yet another aspect, provided herein is a kit for producing a plant having a mutation in a PYR/PYL nucleic acid as described herein. In some embodiments, the kit includes any one of the subject expression vectors disclosed herein and at least one repair nucleic acid, wherein the repair nucleic acid comprises a PYL-E mutation and is capable of introducing the PYL-E mutation in situ in a plant cell genome by homologous recombination upon a Cas9 cleavage event. In certain embodiments, the kit includes a repair nucleic acid that has a sequence that is substantially identical to SEQ ID NOS:374 to 386.

### EXAMPLES

[0172] The following examples are offered to illustrate, but not to limit the claimed invention.

[0173] The affinity of a receptor for a target ligand is typically determined by non-covalent interactions between ligand-binding residues and the ligand. Mutations in such residues can have negative, positive or neutral effects on the strength of the receptor-ligand interaction. The affinity of a receptor-ligand interaction is intrinsically correlated with the concentration of ligand required to elicit biological effects, with high affinity ligands requiring lower concentrations relative to low affinity ligands. A mutant receptor with increased affinity for a ligand can in some cases elicit greater biological effect relative to a wild type receptor, when both are activated under identical conditions by the same concentration of activating ligand. Thus, mutations that make a receptor hypersensitive to a ligand can be useful for engineering organisms that elicit stronger responses to the ligand relative to wild type. Furthermore, ABA hypersensitive plants possess enhanced ABA responses and improved drought tolerance (Wang, Y., et al. Plant J. 43, 413-424 (2005)). Based on these considerations, we set out to systematically establish specific ABA receptor mutations that increase ABA responsiveness. This was done by testing a collection of PYR1 variants with all possible single amino acid substitution mutations in ligand binding residues. Thus we conducted site-saturated mutagenesis of ABA-contacting residues, which we define as those that are within 5 Å or ABA or ABA-contacting water residues in available X-ray coordinates. This collection of mutants was constructed previously, as described in PCT Application No. PCT/US2012/043121 and Mosquna et al., Proc Natl Acad Sci USA 108: 20838-20843 (2011). This collection of mutants was made by mutagenizing a previously described pBD GAL-PYR1 template (Park, S.-Y., et al. Science 324, 1068-1071 (2011)). In response to ABA, this particular plasmid encodes a fusion protein that binds to a co-expressed GAL4 activation domain-HAB1 fusion protein, encoded by the plasmid pACT-HAB1. This binding reconstitutes a functional GAL4 transcriptional activator and subsequent transcription of a β-galactosidase reporter gene, which in turn enables colorimetric based detection of agonist promoted receptor-PP2C interaction when lysed cells are exposed to the substrate X-gal. The mutant clones were individually transformed into S. cerevisiae strain Y190 containing pACT-HAB1. Yeast transformants were selected for the presence of plasmids on synthetic dextrose (SD) agar plates lacking Leu and Trp (SD-LT) and examined for PP2C interactions by using X-gal staining to monitor β-gal reporter gene expression levels. Individual clones were arrayed into 96 well plates and then spotted onto SD-LT lawn (i.e. one-well) plates containing 0, 0.5 or 5.0 μM (+)-ABA. Each assay plate contained 95 mutant clones and one wild type PYR1 positive control clone. The spotted cells were cultured at 30° C. for 48 hours after which they were lysed by chloroform and stained with an X-gal solution, as previously described (Park, S.-Y., et al. (2009) Science 324, 1068-1071). Positive were defined as those mutants that displayed staining on 0.5 μM (+)-ABA but no staining on plates lacking (+)-ABA. After this initial screening exercise, all positives clones were retested on plates containing 0. 0.25, 0.5 and 1 (+)-ABA and stained for galactosidase activity as described above. Mutant clones showing detectable staining on 0.5 μM (+)-ABA or lower were scored as hypersensitive mutants. FIG. 1 depicts results of PYR1 mutant-HAB1 interactions as assayed in a yeast two-hybrid assay under different ABA concentrations, with darker spots indicating increased interaction. This data is also summarized below:

| | | | | | Minimal conc. |
|---|---|---|---|---|---|
| | | | | | For ABA |
| Mutant | SEQ ID NO: | Residue | WT AA | Mutant | response (μM) |
| WT | 1 | | | | 1 |
| F61L | 124 | 61 | F | L | 0.25 |
| F61M | 125 | 61 | F | M | 0.25 |
| V81I | 126 | 81 | V | I | 0.25 |
| V81Y | 127 | 81 | V | Y | 0.25 |
| I110C | 128 | 110 | I | C | 0.25 |
| I110S | 129 | 110 | I | S | 0.5 |
| E141C | 130 | 141 | E | C | 0.5 |
| E141I | 131 | 141 | E | I | 0.25 |
| E141L | 132 | 141 | E | L | 0.25 |
| E141M | 133 | 141 | E | M | 0.25 |
| E141N | 134 | 141 | E | N | 0.5 |
| E141T | 135 | 141 | E | T | 0.5 |
| E141V | 136 | 141 | E | V | 0.5 |
| E141W | 137 | 141 | E | W | 0.5 |
| E141Y | 138 | 141 | E | Y | 0.25 |
| A160C | 139 | 160 | A | C | 0.25 |
| A160I | 140 | 160 | A | I | 0.25 |
| A160V | 141 | 160 | A | V | 0.25 |

[0174] Highly Hypersensitive ABA Receptors Constructed by Combinatorial Mutagenesis

[0175] Additive or synergistic interactions between the single hypersensitive mutations identified can increase a receptor's sensitivity to ABA. To identify potentially beneficial combinations, we used combinatorial mutagenesis to construct receptors that contain combinations of subsets of the best single mutants identified and then screened these to identify receptors with increased sensitivity. Mutagenic primers complementary to the appropriate regions of PYR1 coding sequence were designed to enable the following mutations to be incorporated into a PYR1 template DNA: F61L, F61M, V81I, V81Y, I110C, I110S, E141I, E141L, E141M, E141Y, A160C, A160I, A160V. Equimolar concentrations of these primers were combined with a mixture of wild type primers for each target site (4 mol percent relative to the mutant primer pool) and the primer mix utilized with the QuickChange Lightning Multi Site-Directed PCR Mutagenesis kit (Agilent, USA) using the pBD-PYR1 template DNA. The use of wild type primers in the reaction mixtures enabled, in principle, all double, triple, quadruple and pentuple mutant combinations to be synthesized in the mutagenesis reaction. The reaction products were transformed into competent E. coli cells to yield a pool of ˜10,000 clones, which was then used to prepare plasmid DNA for the mutant library. The pool of mutant plasmids was subsequently introduced into the previously described pAD-HAB1 MAV99 reporter strain (Peterson, F. C., et al. (2010) Nature Structural & Molecular Biology 17, 1109-1113). In this reporter strain, a GAL4 promoter drives expression of a URA3 reporter gene in a genetic background where the endogenous URA3 gene is disrupted, which enables positive selections using uracil deficient media. Thus, mutant clones that encode receptors that can interact with HAB1 can be positively selected using this system. The transformed yeast cells containing the mutant receptor library were next plated onto growth medium lacking uracil and containing 50 nM ABA, a concentration of ABA that is too low to enable growth of control strains. 26 colonies with uracil-independent growth were identified, which were isolated and re-tested on medium lacking ABA to eliminate cones enabling ligand-independent (i.e. constitutive) interactions of receptor with HAB1. Plasmids from yeast cells containing non-constitutive receptors were isolated and sequenced, which revealed that the following 4 highly hypersensitive combination mutants had been isolated:

### PYR1F61L, A160C,

### PYR1F61M, A160V,

### PYR1F61M, I110S, A160V,

### PYR1F61L, V81I, I110C, A160V.

[0176] The plasmids for each of these mutants and their corresponding single mutations were transformed into the previously described yeast reporter strain, Y190 pAD-HAB1 (Park, S.-Y., et al. (2009) Science 324, 1068-1071). The transformed yeast cells were grown on selective media containing a range of ABA concentrations and cells lysed and stained to reveal β-galactosidase activity, as shown in FIG. 4.

[0177] Increased Affinity of a Mutant Hypersensitive Receptor

[0178] The ligand sensitivity of PYR1 and HAB1 yeast two hybrid strains generally correlates with receptor affinity. To examine if this was the case for the hypersensitive mutations identified by our functional screens, we conducted isothermal titration calorimetry (ITC) to measure the heat produced by a mutant receptor-ABA binding reaction and infer the ligand binding dissociation constant (Kd). The affinity of wild type PYR1 has been previously measured using ITC and estimated to be 97±36 μM (Dupeux et al. 2010). The PYR1-A160V mutant receptor was expressed in E. coli BL21(DE3) as a fusion to the small ubiquitin like protein SUMO, using the vector pSUMO (LifeSensors, USA), which improves the solubility of proteins in E. coli and contains an NH2-terminal hexa-histidine tag that facilitates purification using immobilized metal affinity chromatography (IMAC). PYR1 A160V was cloned into pSUMO by using PCR product generated from a pBD-PYR1(A160V) yeast two hybrid construct as template, and sequence validated. A short flexible linker and tobacco etch virus (TEV) protease cleavage site (sequence NH2-GGGSQFGSGGGGGSGSENLYFQS-COOH; SEQ ID NO:411) was incorporated in between the SUMO tag and the receptor to enable cleavage of the recombinant protein by TEV protease, which yields PYR1(A160V) plus an NH2-terminal QS appendage. Recombinant SUMO-TEV-PYR1 (A160V) protein was produced in E. coli and purified by immobilized metal affinity chromatography as previously described (Okamoto et al., Proceedings of the National Academy of Sciences of the United States of America 110, no. 29 (2013): 12132-12137). The purified fusion protein was digested with recombinant TEV protease according to established protocols, and the cleaved protein subsequently separated from both the SUMO tag and uncleaved protein by passing the cleavage reaction over an IMAC column, which does not retain the cleaved PYR1(A160V) product. The cleaved protein was purified by gel filtration using a Superdex column (GE Healthcare, USA) and concentrated by centrifugal concentration using Amicon filters (EMD, USA), as previously described (Dupeux et al, The EMBO Journal 30, no. 20 (2011): 4171-4184). The concentrated protein was utilized for ITC experiments, using a TA instruments Nano ITC Low Volume instrument, repeatedly injecting 2.5 μL of a 600 μM (+)-ABA solution into a reaction cell containing 60 μM PYR1(A160V) every 300 seconds for 200 minutes. Both the ABA and protein were dissolved in a buffer containing PBS, 1 mM 2-mercaptoethanol and 0.012% DMSO. The thermograms generated were processed using the instrument's software to a normalized fit single binding site model, which yielded a Kd of 1.5 μM and a binding stoichiometry of 1.068. These data demonstrate that the A160V mutation possesses increased ABA affinity relative to wild type PYR1, consistent with the increased sensitivity indicated by yeast two hybrid assays.

### Targeted Genome Modification

[0179] Non-transgenic plants harboring induced mutations in specific genes can be obtained in multiple ways. Chemical mutagenesis of an organism can be used to create random genome-wide mutations and populations of mutagenized individuals can be scanned using high-throughput mutation detection methods to identify individuals harboring specific mutations in genes of interest. For example, TILLING (Targeting Induced Local Lesions in Genomes) enables an investigator to identify non-naturally occurring induced-mutations in a gene by using PCR to amplify a gene of interest from 1000s of mutagenized individuals and use hetero-duplex specific nucleases, such as celery nuclease CEL1, to identify plants harboring a mutation in the PCR amplified region (McCallum, C. M., et al. (2000). Nat. Biotechnol. 18, 455-457). Many technologies are available for polymorphism identification in addition to endonucleases, including direct sequencing of PCR products obtained from mutagenized individuals.

[0180] To identify maize plants containing ABA receptors with increased sensitivity an EMS mutagenized population is created and from this population all ABA receptor genes are PCR amplified from 1000s of mutagenized plants. The amplified products are scanned for polymorphisms using TILLING methodology and polymorphic fragments identified are sequenced to define the specific mutations present. From this, individuals harboring mutations corresponding to the polymorphisms described in this application are identified.

[0181] The most likely mutants to be obtained using this strategy are those that can be encoded by a single nucleotide substitution, which can be established by examining the codon table. For example, receptors with mutations homologous to F61L or F61M in PYR1 can be obtained in receptor homologs by screening for different single nucleotide substitutions depending on the gene sequence, such as UUU->CUU, or UUC->CUC. The same is true for A160V (GCN->GUN), V81I (GUU->AUU, GUC->AUC, GUA->AUA), V81Y (GUU->UUU, GUC->UUC). In principle, any single mutation can be isolated by chemical mutagenesis TILLING, but in practice the subset of changes that can arise by a single nucleotide substitution are most likely to be obtained. The examples provided above are representative, not exhaustive, and other single nucleotide substitutions enabling desired mutations, such as E141V and I110S, are also possible.

[0182] Other mutation induction systems can be used to target mutations in specific genes, such as genome editing methods, which have the advantages of increasing the frequency of single and multiple mutations at a defined target site (Lozano-Juste, J., and Cutler, S. R. (2014) Trends in Plant Science 19, 284-287). The sequence-specific introduction of a double stranded DNA break (DSB) in a genome leads to the recruitment of DNA repair factors at the breakage site, which then repair lesion by either the error-prone non-homologous end joining (NHEJ) or homologous recombination (HR) pathways. NHEJ repairs the breaks, but is imprecise and often creates diverse mutations at and around the DSB. In cells in which the HR machinery repairs the DSB, sequences with homology flanking the DSB, including exogenously supplied sequences, can be incorporated at the region of the DSB. DSBs can therefore be leveraged by geneticists to increase the frequency of mutations at defined sites, however intrinsic differences between the relative roles of HR and NHEJ can affect the mutation types at a targets locus. A number of technologies have been developed to create DSBs at specific sites including synthetic zinc finger nucleases (ZFNs), transcription activator-like endonucleases (TALENs) and most recently the clustered regularly interspaced short palindromic repeats (CRISPR)/CRISPR-associated protein 9 (Cas9) system. This system is based on a bacterial immune system against invading bacteriophages in which a complex of 2 small RNAs, the CRISPR-RNA (crRNA) and the trans-activating crRNA (tracrRNA) directs a nuclease (Cas9) to a specific DNA sequence complementary to the crRNA. Using any of these systems, an investigator can create DSBs at pre-determined sites in cells expressing the genome editing constructs. In order for homologous recombination to occur, a DNA cassette homologous to the targeted site must be provided, preferably at a high concentration so that HR is favored or NHEJ. Multiple strategies are conceivable for realizing this, including template delivery using agrobacterium mediated transformation or particle bombardment of DNA templates, and one recently described method uses a modified viral genome to provide the double stranded DNA template. For example, Baltes et al. 2014 (Baltes, N. J., et al. (2014) Plant Cell 26, 151-163) recently demonstrated that an engineered geminivirus that was introduced into plant cells using Agrobacterium mediated transformation could be engineered to produce DNA recombination templates in cells where a ZFN was co-expressed.

[0183] In some aspects, once DSBs have been created using any number of technologies, such sites can be exploited to facilitate isolation of targeted genetic changes by either homologous recombination of nucleotide substitutions, deletions or insertions. For example, ABA receptor genes can be targeted using genome editing technologies and progeny plants of the mutagenized plants be screened using the methods outlined above to identify mutations at sites that increase ABA sensitivity. Delivery of genome editing constructs into organisms can involve both unstable transient expression constructs or stable integration of constructs into genomes delivered by Agrobacterium mediated transformation. In the latter case, stable transgenic plants can be used to express genome-editing constructs in plants to increase mutation frequencies at the target site. Once the desired mutants are isolated through polymorphism scans (analogous to those used in TILLING), individuals can be back crossed wild type lines to segregate away transgenic insertion events.

[0184] Conceptually, these methods are analogous to TILLING and the methods for identifying defined mutations would be similar, however because of the targeted nature of these methods, the frequency of mutations at defined sites will be higher and mutations involving changes of more than a single base pair can be identified more readily.

### Targeted Amino Acid Modification of Maize ABA Receptors Mediated by CRISPR-Cas9

### 1. Maize ABA Receptor (ZmPYL) Target Gene Modification

[0185] In vivo modification of plant ABA receptors is described using maize ZmPYL genes as an example. Maize genome contains more than 10 ABA receptors (ZmPYL-A to ZmPYL-P) that share several highly conserved amino acids with AtPYL1. To obtain ABA hypersensitive mutations in the endogenous ZmPYL-E (GRMZM2G165567) gene, two amino acids (V89 and E149) are chosen as targets for sequence-specific mutagenesis into desired mutant amino acids, alanine and leucine (V89A and E149L), respectively, using homology-directed gene repair mediated by sequence-specific nucleases and donor DNA template. Currently, there are several technology platforms for making sequence-specific nucleases, including for example zinc-finger nuclease, TALE nuclease, CRISPR-Cas9 and engineered meganuclease (Puchta and Fauser (2014), Synthetic nucleases for genome engineering in plants: prospects for a bright future. Plant Journal 78:727-741; Chen and Gao (2014) Targeted genome modification technologies and their applications in crop improvements. Plant Cell Rep. 33:575-583), any of which can be used to produce a plant comprising an in situ hypersensitive mutation in a genomic coding sequence PYR/PYL polypeptide as described herein.

[0186] The following examples describe the use of CRISPR-Cas9 system for making targeted gene modification in endogenous ZmPYL-E gene. CRISPR-Cas9-mediated gene modification requires these components: Cas9 nuclease, crRNA (CRISPR RNA) recognizing the mutagenesis target, tracRNA (transactivating RNA) and repair donor DNA template molecule. For easiness of use, crRNA and tracRNA are fused and delivered as a single guide RNA molecule (gRNA or sgRNA) [Sander and Joung (2014) CRISPR-Cas systems for editing, regulating and targeting genomes. 32:347-355].

### 2. Optimization of Cas9 and its Expression in Maize Cells

[0187] In order to achieve good expression in maize cells, Type II Cas9 gene from Streptococcus pyogenes SF370 is optimized with maize-preferred codons. Nuclear localization signal is also incorporated into the C-terminus of Cas9 to improve its targeting to nucleus. Below is the optimized Cas9 sequence (cBCas9Nu-01, aka, cCas9-01). To express Cas9 in maize cells, the maize-optimized Cas9 gene (cBCas9Nu-01) is placed under the control of maize ubiquitin-1 promoter (prUbi1-10) and is followed by a terminator sequences (tNOS) (FIG. 5).

3. gRNA Design and Expression
3.1 gRNAs for Mediating V89A Modification: Structure and its Expression

[0188] For targeted V89A modification, crRNAs of at least 17 nucleotides (nt) long are designed against the maize ZmPYL-E genomic target sequence (5′-CGCGA CGTCA ACGTC AAGAC-3′) (SEQ ID NO:362) preceding the 5′-CGG-3′ PAM (protospacer adjacent motif) sequence for Cas9-mediated target recognition. For example, gRNAs of 17-nt (5′-GA CGUCA ACGUC AAGAC-3′) (SEQ ID NO:363), 18-nt (5′-CGA CGUCA ACGUC AAGAC-3′) (SEQ ID NO:364), 19-nt (5′-GCGA CGUCA ACGUC AAGAC-3′) (SEQ ID NO:365), 20-nt (5′-CGCGA CGUCA ACGUC AAGAC-3′) (SEQ ID NO:366) or 21-nt (5′-G CGCGA CGUCA ACGUC AAGAC-3′) (SEQ ID NO:367) can be used to guide Cas9 cleavage of the ZmPYL-E target. crRNA is co-delivered with tracRNA and Cas9 protein or mRNA to mediate target site cleavage. Preferably, crRNA molecule is fused with tracRNA molecule covalently into a single guide RNA (gRNA). gRNAs can be synthesized chemically or produced by in vitro transcription. In vitro produced gRNAs can be used directly for physical delivery such as biolistic bombardment with Cas9 RNA or protein to mediate target cleavage and homology-directed target modification if repair donor oligonucleotide is co-delivered. More preferably, gRNA is produced in planta from DNA expression cassette comprising RNA polymerase III (PolIII) promoter such as plant U3 and U6 promoters such as rice U3 and U6 promoters (prOsU3 and prOsU6). For prOsU3, the transcription start begins with nucleotide A, whereas for prOsU6, the transcription starts with nucleotide G (Shan et al. (2013) Nature Biotechnology 31: 686-688; Xie and Yang (2013) Molecular Plant 6:1975-1983). For example, to produce gRNA targeting the endogenous ZmPYKL-E sequence (5′-CGCGA CGTCA ACGTC AAGAC-3′) (SEQ ID NO:362), 19-nt DNA oligonucleotides (5′-GCGA CGTCA ACGTC AAGAC-3′) (SEQ ID NO:365) or 21-nt oligonucleotides (5′-G CGCGA CGTCA ACGTC AAGAC-3′) (SEQ ID NO:367) is fused to the DNA sequences encoding tracRNA scaffold ((5′-GTTTT AGAGC TAGAA ATAGC AAGTT AAAAT AAGGC TAGTC CGTTA TCAAC TTGAA AAAGT GGCAC CGAGT CGGTG C-3′) (SEQ ID NO: 370) and PolIII termination sequences (5′-GTTTT AGAGC TAGAA ATAGC AAGTT AAAAT AAGGC TAGTC CGTTA TCAAC TTGAA AAAGT GGCAC CGAGT CGGTG CTTTT TTTTT-3′(SEQ ID NO:413), Mali et al. (2013) Science 339:823-826) and placed under the control of rice polymerase III promoter U3 (prOsU3) or U6 (prOsU6). Below is the sequence (SEQ ID NO:371) of the expression cassette comprising of prOsU3 and coding sequences for the gRNA comprising the 19-nt V89A crRNA (underlined) fused with tracRNA. This sequence is cloned into biolistic transformation vector along with the Cas9 expression cassette to form vector pZmPYLE-V89A (FIG. 5).

(SEQ ID NO: 371)
5′-GGGAT CTTTA AACAT ACGAA CAGAT CACTT AAAGT TCTTC TGAAG CAACT TAAAG TTATC
AGGCA TGCAT GGATC TTGGA GGAAT CAGAT GTGCA GTCAG GGACC ATAGC ACAGG ACAGG CGTCT
TCTAC TGGTG CTACC AGCAA ATGCT GGAAG CCGGG AACAC TGGGT ACGTT GGAAA CCACG TGATG
TGGAG TAAGA TAAAC TGTAG GAGAA AAGCA TTTCG TAGTG GGCCA TGAAG CCTTT CAGGA CATGT
ATTGC AGTAT GGGCC GGCCC ATTAC GCAAT TGGAC GACAA CAAAG ACTAG TATTA GTACC ACCTC
GGCTA TCCAC ATAGA TCAAA GCTGG TTTAA AAGAG TTGTG CAGAT GATCC GTGGC AGCGA CGTCA
ACGTC AAGAC GTTTT AGAGC TAGAA ATAGC AAGTT AAAAT AAGGC TAGTC CGTTA TCAAC TTGAA
AAAGT GGCAC CGAGT CGGTG CTTTT TTTTT-3′

[0189] The sequence example below (SEQ ID NO:372) describes the expression cassette comprising of prOsU6 promoter and coding sequences for a gRNA comprising the 21-nt V89A crRNA (underlined) and tracRNA.

(SEQ ID NO: 372)
5′-TTTGT GAAAG TTGAA TTACG GCATA GCCGA AGGAA TAACA GAATC GTTTC ACACT TTCGT
AACAA AGGTC TTCTT ATCAT GTTTC AGACG ATGGA GGCAA GGCTG ATCAA AGTGA TCAAG CACAT
AAACG CATTT TTTTA CCATG TTTCA CTCCA TAAGC GTCTG AGATT ATCAC AAGTC ACGTC TAGTA
GTTTG ATGGT ACACT AGTGA CAATC AGTTC GTGCA GACAG AGCTC ATACT TGACT ACTTG AGCGA
TTACA GGCGA AAGTG TGAAA CGCAT GTGAT GTGGG CTGGG AGGAG GAGAA TATAT ACTAA TGGGC
CGTAT CCTGA TTTGG GCTGC GTCGG AAGGT GCAGC CCACG CGCGC CGTAC CGCGC GGGTG GCGCT
GCTAC CCACT TTAGT CCGTT GGATG GGGAT CCGAT GGTTT GCGCG GTGGC GTTGC GGGGG ATGTT
TAGTA CCACA TCGGA AACCG AAAGA CGATG GAACC AGCTT ATAAA CCCGC GCGCT GTAGT CAGCT
TGCGC GACGT CAACG TCAAG ACGTT TTAGA GCTAG AAATA GCAAG TTAAA ATAAG GCTAG TCCGT
TATCA ACTTG AAAAA GTGGC ACCGA GTCGG TGCTTTT TTTTT-3′

3.2 gRNA for Mediating E149L Modification: Structure and its Expression

[0190] For targeted E149L modification of the maize ZmPYL-E, the two underlined bases in the maize genomic target sequence (5′-GCACC CTGGT GATCG AGTCG TTCGT GGTCG-3′) (SEQ ID NO:368) needs to be converted into CT to form mutant sequence (5′-GCACC CTGGT GATCC TGTCG TTCGT GGTCG-3′ (SEQ ID NO:412)). In order to achieve that, an expression cassette for a sequence coding for the 20-nt guide RNA (5′-CCTGG TGATC CTGTC GTTCG-3′, xZmPYLE-E149L) (SEQ ID NO:369), tracRNA scaffold and PolIII termination sequences (5′-GTTTT AGAGC TAGAA ATAGC AAGTT AAAAT AAGGC TAGTC CGTTA TCAAC TTGAA AAAGT GGCAC CGAGT CGGTG CTTTT TTTTT-3′ (SEQ ID NO:413), Mali et al. (2013) Science 339:823-826) was placed under the control of rice polymerase III promoter U6 (prOsU6) as shown in FIG. 6. prOsU6 promoter initiates transcription after nucleotide G. In FIG. 6, the prOsU6-E149L gRNA expression cassette has the following sequences (SEQ ID NO:373) with the 20 bp targeting guide sequence (xZmPYLE-E149L or xZmPYLe, SEQ ID NO: 369) underlined.

(SEQ ID NO: 373)
5′-TTTGT GAAAG TTGAA TTACG GCATA GCCGA AGGAA TAACA GAATC GTTTC ACACT TTCGT
AACAA AGGTC TTCTT ATCAT GTTTC AGACG ATGGA GGCAA GGCTG ATCAA AGTGA TCAAG CACAT
AAACG CATTT TTTTA CCATG TTTCA CTCCA TAAGC GTCTG AGATT ATCAC AAGTC ACGTC TAGTA
GTTTG ATGGT ACACT AGTGA CAATC AGTTC GTGCA GACAG AGCTC ATACT TGACT ACTTG AGCGA
TTACA GGCGA AAGTG TGAAA CGCAT GTGAT GTGGG CTGGG AGGAG GAGAA TATAT ACTAA TGGGC
CGTAT CCTGA TTTGG GCTGC GTCGG AAGGT GCAGC CCACG CGCGC CGTAC CGCGC GGGTG GCGCT
GCTAC CCACT TTAGT CCGTT GGATG GGGAT CCGAT GGTTT GCGCG GTGGC GTTGC GGGGG ATGTT
TAGTA CCACA TCGGA AACCG AAAGA CGATG GAACC AGCTT ATAAA CCCGC GCGCT GTAGT CAGCT
TGCCT GGTGA TCGAG TCGTT CGGTT TTAGA GCTAG AAATA GCAAG TTAAA ATAAG GCTAG TCCGT
TATCA ACTTG AAAAA GTGGC ACCGA GTCGG TGCTT TTTTT TT-3′

[0191] Alternatively, the guide RNA can also be expressed from a different polymerase III promoter like rice U3 promoter (prOsU3) which initiates tracription after nucleotide A. The prOsU3-E149L gRNA expression cassette has the following sequences (SEQ ID NO:374) with the 20 bp targeting guide sequence (xZmPYLE-E149L or xZmPYLe, SEQ ID NO: 369) underlined. This prOsU3-E149L gRNA expression cassette along with PMI selectable marker gene cassette and prSoUbi4 driven Cas9 gene expression cassette are inserted into binary vector backbone to form transformation vector 23190 (FIG. 8).

(SEQ ID NO: 374)
5′-GGGAT CTTTA AACAT ACGAA CAGAT CACTT AAAGT TCTTC TGAAG CAACT TAAAG
TTATC AGGCA TGCAT GGATC TTGGA GGAAT CAGAT GTGCA GTCAG GGACC ATAGC
ACAGG ACAGG CGTCT TCTAC TGGTG CTACC AGCAA ATGCT GGAAG CCGGG AACAC
TGGGT ACGTT GGAAA CCACG TGATG TGGAG TAAGA TAAAC TGTAG GAGAA AAGCA
TTTCG TAGTG GGCCA TGAAG CCTTT CAGGA CATGT ATTGC AGTAT GGGCC GGCCC
ATTAC GCAAT TGGAC GACAA CAAAG ACTAG TATTA GTACC ACCTC GGCTA TCCAC
ATAGA TCAAA GCTGG TTTAA AAGAG TTGTG CAGAT GATCC GTGGC ACCTG GTGAT
CGAGT CGTTC GGTTT TAGAG CTAGA AATAG CAAGT TAAAA TAAGG CTAGT CCGTT
ATCAA CTTGA AAAAG TGGCA CCGAG TCGGT GCTTT TTTTT T-3′

4. Generation of Mutants with Targeted Genomic Sequence Modification in ZmPYL-E Gene
4.1 Generation of Targeted Mutation V89A in ZmPYL-E Gene with Biolistic Bombardment

[0192] For target gene sequence modification mediated by homology-directed repair, donor DNA molecule needs to be co-delivered with Cas9 and gRNA. DNA molecule with at least 15 nucleotides flanking the Cas9 cleavage site and containing the intended mutant nucleotide(s) is used as repair donor. For modification of the target sequence 5′-CGCGA CGTCA ACGTC AA/GAC-3′ to result in V89A mutation, the single underlined residue T needs to be converted to C so valine at position 89 (V89, GTC) is changed to alanine (A89, GCC). Since the intended Cas9 cleavage site (indicated by /) is 9 nucleotides downstream, preferably, the repair DNA molecule should contain sequences at least 15-nt upstream of TCA and 15-nt downstream of the underlined A in AA/GAC as in this sequence (5′-GCAGCCT GCGCGACGCC AACGTCAA/GA CCGGCCTGCC GGC-3′) (SEQ ID NO:375). More preferably, the repair DNA molecule should contain sequences with at least 20-nt upstream of TCA and at least 20-nt downstream of the underlined A in AA/GAC as outlined in this sequence (5′-GG TCGGCAGCCT GCGCGACGCC AACGTCAA/GA CCGGCCTGCC GGCGACGA-3′) (SEQ ID NO:376). More preferably, the repair DNA molecule should contain sequences with more than 30-nt upstream of TCA and more than 30-nt downstream of the underlined A in AA/GAC as outlined in this sequence (5′-AC CAGCTC GAGG TCGGCAGCCT GCGCGACGCC AACGTCAA/GA CCGGCCTGCC GGCGACGACC AGAACCGA-3′) (SEQ ID NO:377). Most preferably, the repair DNA molecule should contain sequences with more than 50-nt upstream of TCA and more than 50-nt downstream of the underlined A in AA/GAC as indicated in this sequence (5′-GA ACTGCGTCGT GCGCGGGGAC CAGCTC GAGG TCGGCAGCCT GCGCGACGCC AACGTCAA/GA CCGGCCTGCC GGCGACGACC AGAACCGAGC GCCTCGAGCA GCTCGACGA-3′) (SEQ ID NO:378). It should be noted that oligonucleotides with sequences corresponding to the opposite strand of SEQ ID NO:375 to SEQ ID NO:378 can also be used for mediating targeted V89A mutation.

[0193] To generate plants carrying V89A mutation, the above described repair donor DNA oligonucleotide (5′-AC CAGCTC GAGG TCGGCAGCCT GCGCGACGCC AACGTCAA/GA CCGGCCTGCC GGCGACGACC AGAACCGA-3′) (SEQ ID NO:377) that comprise sequences 30-nt upstream of TCA and 30-nt downstream of the underlined A in AA/GAC is co-precipitated with pZmPYLE-V89A vector (FIG. 1) onto gold particles and bombarded into immature maize embryos (genotype A188, Hill or other applicable varieties). Methods for maize immature embryo bombardment, callus induction tissue regeneration and rooting methods have been described previously except here no mannose selection is required (Wright et al., 2001, Efficient biolistic transformation of maize (Zea mays L.) and wheat (Triticum aestivum L.) using the phosphomannose isomerase gene, pmi, as the selectable marker. Plant Cell Reports 20:429-436.). Briefly, immature embryos are isolated from harvested immature ears at about 9-12 days after pollination and pre-cultured for 3 to 5 days on osmoticum media. Pre-cultured embryos are then bombarded with DNA vector ZmPYLE-V89A and the donor oligonucleotide using BioRad PDS-1000 Biolistic particle delivery system. Bombarded embryos are then incubated in callus induction media and then moved onto regeneration media to induce shoot formation. Shoots are then moved to rooting media. Preferably but not essential, a selectable marker gene cassette like PMI is also added to the ZmPYLE-V89A vector so only transformed cells containing an integrated gRNA or Cas9 expression cassette will be selected for regeneration. Samples are then harvested from regenerated plants for genotyping to identify plants containing the desired V89A mutation in the ZmPYL-E gene. Genotyping can be done with one or more of the standard mutation detection methods such as PCR amplification followed by sequencing, capillary electrophoresis and Nuclease Surveyer assay.

[0194] ZmPYLE-V89A vector carries the gRNA and Cas9 expression cassettes can also be delivered into maize cells using other physical delivery method such as protoplast transformation and silicon carbide whisker-mediated transformation. The repair donor DNA molecule can also be delivered into cells in the form of single- or double-stranded molecule that is present as part of a recombinant DNA molecule such as restriction fragment or plasmid or T-DNA or viral replicon for generation of transformed cells using methodologies known in the art. Alternatively, gRNA and Cas9 expression vectors and repair donor vector can be transformed into maize cells with Agrobacterium-mediated transformation. It should be noted that for targeted modification, no integration of Cas9 or gRNA expression vector is required or even preferred. Therefore, these vectors can be delivered transiently by biolistic transformation or Agrobacterium-mediated transformation.

4.2 Generation of Targeted Mutation E149L in ZmPYL-E Gene with Biolistic and Agrobacterium-Mediated Transformation

[0195] Similar to the above example (Section 4.1) for generating ZmPYLE-V89A mutation, targeted E149L mutation (Table 1) can be introduced into ZmPYL-E gene using biolistic bombardment using DNA vectors carrying Cas9 and gRNA expression cassettes such as these shown in FIG. 6 and FIG. 8 along with repair donor DNA sequences containing the desired mutation such as in the form of purified oligonucleotide with this sequence (ZmPYL-Eb, SEQ ID NO:379, 5′-TGACG GGAGG CCGGG CACCC TGGTG ATCCT GTCGT TCGTA GTCGA TGTGC CTGAT GGCAA-3′, Table 2). Other forms of repair donor oligonucleotides can be used too. For example, the oligonucleotides can be longer or in the complimentary strand or contain chemical modifications (e.g. phosphorothioate or methylphosphonate) to enhance stability or affinity to the target sequences. Chemically modified oligonucleotides have been described (Deleavey and Damha, 2012, Chemistry & Biology, on the world wide web at dx.doi.org/10.1016/j.chembiol.2012.07.011). To demonstrate utility of such chemically modified oligonucleotides, experiments were done using oligonucleotides with sequences from the non-coding strand and also containing phosphorothioate linkage (Table 2, ZmPYL-Ec-NT-PM, SEQ ID NO:380, 5′-T*T*C*GT GTTGC CATCA GGCAC ATCGA CTACG AACGA CAGGA TCACC AGGGT GCCCG GCCTC CCGTC AATG*C* T*C-3′, * denotes the presence of phosphorothioate linkage between nucleotides).

[0196] Targeted mutation E149L in ZmPYL-E gene can also be generated with DNA molecules delivered via Agrobacterium. Agrobacterium-mediated transformation methods have been described elsewhere (Ishida et al. (1996). High efficiency transformation of maize (Zea mays L.) mediated by Agrobacterium tumefaciens. Nat. Biotechnol. 14, 745-750; Negrotto et al. (2000). Theuse of phosphomannose-isomerase as a selectable marker to recover transgenic maize plants (Zea mays L.) via Agrobacterium transformation. Plant Cell Rep. 19, 798-803.). Briefly, the prOsU6-E149L (SEQ ID NO:373) or prOsU3-E148L (SEQ ID NO:374) gRNA expression cassette is cloned into a binary vector carrying PMI selectable marker cassette and also an expression cassette for Cas9 with maize preferred codons forming transformation vector pZmPYLE-E149L and 23190 (FIG. 6, FIG. 8, Table 1). These vectors can be used to deliver Cas9 and gRNA expression cassettes into maize cells with Agrobacterium-mediated transformation. The repair donor DNA molecule containing the intended mutant sequences (5′-TGACG GGAGG CCGGG CACCC TGGTG ATCCT GTCGT TCGTA GTCGA TGTGC CTGAT GGCAA-3′) (SEQ ID NO:379) is co-delivered into cells from a separate T-DNA molecule. However, it can be also be inserted into the T-DNA region next to the gRNA and Cas9 expression cassettes in the binary vector pZmPYLE-E149L or 23190 (FIG. 2). The donor repair template can also be delivered in the form of viral replicon derived from another T-DNA (Baltes et al. 2014, DNA replicons for plant genome engineering. Plant Cell. 26:151-163). PMI marker is used to select for transgenic plants with integrated Cas9 or gRNA expression cassette. However, it should be noted that stable transformation of transformation vectors is not essential or even preferred for generating desired mutations as long as enough plants are screened since transient expression of Cas9 and gRNA is sufficient to result in cleavage of the chromosomal target sequence to induce DNA repair. However, it should be noted that for targeted modification, no integration of Cas9 or gRNA expression vector is required or even preferred.

### 4.3 Generation of Multiple Amino Acid Modifications in ZmPYL-E Gene Simultaneously

[0197] It should be noted that more than one target can be modified at the same time if gRNAs and repair donors for multiple target sequences are present at the same time. For example, both V89A and E149L mutations can be obtained by co-bombarding vector pZmPYLE-V89A-E149L containing expression cassettes for Cas9 and two gRNAs (FIG. 7) along with both repair donor DNA templates, V89A oligonucleotide (5′-AC CAGCTC GAGG TCGGCAGCCT GCGCGACGCC AACGTCAA/GA CCGGCCTGCC GGCGACGACC AGAACCGA-3′)(SEQ ID NO:377) and E149L oligonucleotides ODN-ZmPYL-Eb (5′-TGACG GGAGG CCGGG CACCC TGGTG ATCCT GTCGT TCGTA GTCGA TGTGC CTGAT GGCAA-3′) (SEQ ID NO:379) or ODN-ZmPYL-Ec-NT-PM (SEQ ID NO:380, 5′-T*T*C*GT GTTGC CATCA GGCAC ATCGA CTACG AACGA CAGGA TCACC AGGGT GCCCG GCCTC CCGTC AATG*C* T*C-3′, * denotes the presence of phosphorothioate linkage between nucleotides).

[0198] As described for generating plants with single mutations, bombarded embryos are then incubated in callus induction media and then moved onto regeneration media to induce shoot formation. Shoots are then moved to rooting media. PMI marker can be used to select for transgenic plants with integrated Cas9 or gRNA expression cassette. However, it should be noted again that stable transformation of transformation vectors is not essential or even preferred for generating desired mutations as long as enough plants are screened to identify plants with desired mutations since transient expression of Cas9 and gRNA is sufficient to result in cleavage of the chromosomal target sequence to induce DNA repair. Samples are then harvested from regenerated plants for genotyping to identify plants containing the desired V89A and E149L mutations in the ZmPYL-E gene. Genotyping can be done with one or more of the standard mutation detection methods such as PCR amplification followed by sequencing, capillary electrophoresis and Nuclease Surveyer assay.

### 4.4 Generation of Additional Targeted Mutations at V89 Position in ZmPYL-E Gene

[0199] Alternate site-directed changes can be introduced at the V89 position of the ZmPYL-E to obtain ABA hypersensitive mutations by using similar method described above for creating V89A mutation except that repair donor oligonucleotide sequences need to be changed to introduce the corresponding mutations. For example, V89I and V89Y mutations can be introduced by using the same gRNAs (SEQ ID NOS: 363 to 367) to guide Cas9 cleavage of the ZmPYL-E target. Expressing cassettes for gRNA and Cas9 can be delivered into maize cells simultaneously by any physical or biological methods such as biolistic bombardment or Agrobacterium-mediated transformation. For introduction of V89I mutation, the single underlined residue G in the ZmPYL-E genomic target sequence 5′-CGCGA CGTCA ACGTC AA/GAC-3′ needs to be converted to A, so valine at position 89 (V89, GTC) is changed to isoleucine (189, ATC). Since the intended Cas9 cleavage site (indicated by /) is 9 nucleotides downstream, preferably, the repair DNA molecule should contain sequences at least 15-nt upstream of GTC and 15-nt downstream of the underlined A in AA/GAC as in this sequence (5′-GGCAGCCT GCGCGACATC AACGTCAAGA CCGGCCTGCC GGC-3′) (SEQ ID NO:381). More preferably, the repair DNA molecule should contain sequences with at least 20-nt upstream of ATC and at least 20-nt downstream of the underlined A in AAGAC as outlined in this sequence (5′-AGG TCGGCAGCCT GCGCGACATC AACGTCAAGA CCGGCCTGCC GGCGACGA-3′) (SEQ ID NO:382). More preferably, the repair DNA molecule should contain sequences with more than 30-nt upstream of ATC and more than 30-nt downstream of the underlined A in AAGAC as outlined in this sequence (5′-GAC CAGCTC GAGG TCGGCAGCCT GCGCGACATC AACGTCAAGA CCGGCCTGCC GGCGACGACC AGAACCGA-3′) (SEQ ID NO:383). Most preferably, the repair DNA molecule should contain sequences with more than 50-nt upstream of ATC and more than 50-nt downstream of the underlined A in AAGAC as indicated in this sequence (5′-GGA ACTGCGTCGT GCGCGGGGAC CAGCTC GAGG TCGGCAGCCT GCGCGACATC AACGTCAAGA CCGGCCTGCC GGCGACGACC AGAACCGAGC GCCTCGAGCA GCTCGACGA-3′) (SEQ ID NO:384).

[0200] For introduction of V89Y mutation, the two underlined residues GT in the maize genomic target sequence 5′-CGCGA CGTCA ACGTC AA/GAC-3′ need to be converted to TA, so the valine residue at position 89 (V89, GTC) is changed to tyrosine (Y89, TAC). Since the intended Cas9 cleavage site (indicated by /) is 9 nucleotides downstream, preferably, the repair DNA molecule should contain sequences at least 15-nt upstream of GTC and 15-nt downstream of the underlined A in AA/GAC as in this sequence (5′-GGCAGCCT GCGCGACTAC AACGTCAAGA CCGGCCTGCC GGC-3′) (SEQ ID NO:385). More preferably, the repair DNA molecule should contain sequences with at least 20-nt upstream of TAC and at least 20-nt downstream of the underlined A in AAGAC as outlined in this sequence (5′-AGG TCGGCAGCCT GCGCGACTAC AACGTCAAGA CCGGCCTGCC GGCGACGA-3′) (SEQ ID NO:386). More preferably, the repair DNA molecule should contain sequences with more than 30-nt upstream of TAC and more than 30-nt downstream of the underlined A in AAGAC as outlined in this sequence (5′-GAC CAGCTC GAGG TCGGCAGCCT GCGCGACTAC AACGTCAAGA CCGGCCTGCC GGCGACGACC AGAACCGA-3′) (SEQ ID NO:387). Most preferably, the repair DNA molecule should contain sequences with more than 50-nt upstream of TAC and more than 50-nt downstream of the underlined A in AA/GAC as indicated in this sequence (5′-GGA ACTGCGTCGT GCGCGGGGAC CAGCTC GAGG TCGGCAGCCT GCGCGACTAC AACGTCAAGA CCGGCCTGCC GGCGACGACC AGAACCGAGC GCCTCGAGCA GCTCGACGA-3′) (SEQ ID NO:388).

[0201] Similarly, double mutants containing V89I (or V89Y) and E149L (see, e.g., SEQ ID NOS:390, 391 and 392) can be obtained by transforming maize cells with vectors containing expression cassettes for Cas9 and two gRNAs along with oligonucleotides to introduce corresponding mutations (E149L, V89I or V89Y) as described above in section 4.3.

### 5. Generation of Targeted E169L Genomic Sequence Modification in Additional ZmPYL Gene Family Members, ZmPYL-D, ZmPYL-F and ZmPYL-J

[0202] 5.1 Mutagenesis Targets and gRNA Design

[0203] Similar to examples described above for endogenous ZmPYL-E gene (Example 4 and Table 1), additional ZmPYL gene family members were also chosen for targeted genome editing to replace specific nucleotides so the amino acid residue corresponding to E¹⁶⁹ in the ABA receptors (ZmPYL-D, ZmPYL-F and ZmPYL-J) is changed to a hypersensitive form L¹⁶⁹. These intended changes are summarized in Table 1. These experiments aimed to modify the corresponding conserved amino acid residue E (glutamic acid) into L (Leucine) in homologous ZmPYL genes.

TABLE 1
ZmPYL mutations and gRNA sequences and transformation vectors

| | | Desired | | |
|---|---|---|---|---|
| | WT maize | mutant | | Trans- |
| ZmPYL | protein | protein | gRNA target sequence in transformation | formation |
| gene | sequence | sequence | vector (SEQ. ID. NO. and notes) | vector name |
| ZmPYL-E | LVIE¹⁴⁹SFV | LVIL¹⁴⁹SFV | 5′-cctgg tgatc gagtc gttcg-3′ (SEQ. ID. | 23190 |
| (GRMZM2G16 | | | NO: 369; target site in coding strand, base | |
| 5567_P02) | | | replacement 5 bp away from the Cas9 | |
| | | | cleavage site) | |
| ZmPYL-D | TLVIE¹⁶⁹SFV | TLVIL¹⁶⁹SFV | 5′-gtcgg ggacg tcgac gacga-3′ (SEQ. ID. | 23136 |
| (GRMZM2G04 | | | NO: 393; target site in template strand, | |
| 8733_P02) | | | base replacement 8 bp away from the | |
| | | | Cas9 cleavage site) | |
| ZmPYL-D | LVIE¹⁶⁹SFV | LVIL¹⁶⁹SFV | 5′-gaggt catcg acggc cggcc-3′ (SEQ. ID. | 23189 |
| (GRMZM2G04 | | | NO: 394; target site in coding strand, base | |
| 8733_P02) | | | replacement 19 bp away from the Cas9 | |
| | | | cleavage site) | |
| ZmPYL-F | LVIE¹⁶⁴SFV | LVIL¹⁶⁴SFV | 5′-gctcg tgatc gagtc cttcg tgg-3′ (SEQ. | 22981 |
| (GRMZM2G05 | | | ID. NO: 395; longer targeting guide | |
| 3882_P01) | | | sequence (23 bp), target site in coding | |
| | | | strand, base replacement 8 bp away from | |
| | | | the Cas9 cleavage site) | |
| ZmPYL-F | LVIE¹⁶⁴SFV | LVIL¹⁶⁴SFV | 5′-gctcg tgatc gagtc cttcg-3′ (SEQ. ID. | 23191 |
| (GRMZM2G05 | | | NO: 396; shorter targeting guide sequence | |
| 3882_P01) | | | (20 bp), target site in coding strand, base | |
| | | | replacement 5 bp away from the Cas9 | |
| | | | cleavage site) | |
| ZmPYL-J | VVLE¹⁴⁸SYV | VVLE¹⁴⁸SYV | 5′-cgtcg acgac gtagg actcg-3′ (SEQ. ID. | 23192 |
| (GRMZM2G15 | | | NO: 397; target site in template strand, | |
| 4987_P01) | | | base replacement at the Cas9 cleavage | |
| | | | site) | |

5.2 Constructions of Vectors for Expression of gRNAs Targeting ZmPYL-D, ZmPYL-F and ZmPYL-J Genes

[0204] Similar to examples described above for constructing 23190 for expressing gRNA for endogenous ZmPYL-E gene (Example 4), transformation vectors expressing Cas9 and different gRNAs (Table 1) for ZmPYL-D (23136 and 23189), ZmPYL-F (22981 and 23191) and ZmPYL-J (23192) genes were constructed (FIGS. 9A-9B, 10A-10B and 11). The gRNA targeting sequence for different ZmPYL genes are listed in Table 1 (SEQ ID NO:393 to 397). In these vectors, the whole gRNA coding regions [˜20 nucleotide targeting guides (SEQ ID NO:393 to 397), tracRNA scaffold and PolIII termination sequences (5′-GTTTT AGAGC TAGAA ATAGC AAGTT AAAAT AAGGC TAGTC CGTTA TCAAC TTGAA AAAGT GGCAC CGAGT CGGTG CTTTT TTTTT-3′(SEQ ID NO:413))] were placed under the control of rice polymerase III U3 promoter (prOsU3). These vectors also contain a PMI selectable marker gene cassette for selecting stable transformants. These vectors can be used for transformation mediated by Agrobacterium-mediated transformation or used directly for particle bomdbarment.

### 5.3 Generation of Genome Edited Novel Alleles (Targeted Mutagenesis and Allele Replacement Mutants) Mediated CRISPR-Cas in ZmPYL-D, ZmPYL-F and ZmPYL-J Genes

[0205] Novel alleles including targeted mutagenesis and allele replacement mutants can be generated via CRISPR-Cas system in the presense of repair donor DNA by Agrobacterium-mediated transformation or particle bomdbarment as described in Example 4 for ZmPYL-E. Here specific examples are provided for targeted nutations in ZmPYL-D, ZmPYL-F and ZmPYL-J genes using biolistic co-delivery of transformation vectors (Table 1 and FIG. 9A-B to 11) and repair donor oligodeoxynucleotides with desired mutations (Table 2 and Seq ID NO:398 to 410). Oligodeoxynucleotides (ODNs) of different length, strand (coding and non-coding template) or modification (with and without phosphorothioate linkage modification at the ends) (Seq ID NO:397 to 409) were used to mediate mutagenesis in different ZmPYL genes.

TABLE 2
Repair donor DNA oligonucleotide sequences

| | Cas9 and gRNA | | | | |
|---|---|---|---|---|---|
| | expression | Oligodeoxynucleotide | Length | | |
| ZmPYL gene | vector(s) | (ODN) | (nt) | Notes | Seq. ID. No. |
| ZmPYL-D | 23136 | ODN-ZmPYL-Dc | 75 | PAM #1 and target site in template strand, | Seq. ID. No. 398 |
| | | | | base replacement 8 bp away from the Cas9 | |
| | | | | cleavage site | |
| ZmPYL-D | 23136 | ODN- ZmPYL-Dd-NT | 75 | PAM#1 and target site in template strand, base | Seq. ID. No. 399 |
| | | | | replacement 8 bp away from the Cas9 | |
| | | | | cleavage site; PAM in donor ODN removed | |
| ZmPYL-D | 23136 | ODN- ZmPYL-Dd-NT-PM | 75 | PAM#1 and target site in coding strand, base | Seq. ID. No. 400 |
| | | | | replacement 8 bp away from the Cas9 | |
| | | | | cleavage site; PAM in donor ODN removed; | |
| | | | | ODN with phosphorothioate linkage | |
| | | | | modification | |
| ZmPYL-D | 23189 | ODN-ZmPYL-Db | 88 | PAM #2 and target site in coding strand, base | Seq. ID. No. 401 |
| | | | | replacement 19 bp away from the Cas9 | |
| | | | | cleavage site; PAM in donor ODN removed; | |
| ZmPYL-E | 23190 | ODN- ZmPYL-Eb | 60 | Target site in coding strand, base replacement | Seq. ID. No. 379 |
| | | | | 5 bp away from the Cas9 cleavage site; ODN | |
| | | | | in non-coding strand; PAM in donor ODN | |
| | | | | removed | |
| ZmPYL-E | 23190 | ODN- ZmPYL-Ec-NT-PM | 72 | Target site in coding strand, base replacement | Seq. ID. No. 380 |
| | | | | 5 bp away from the Cas9 cleavage site; ODN | |
| | | | | with phosphorothioate linkage modification; | |
| | | | | PAM in donor ODN removed | |
| ZmPYL-F | 22981, 23191 | ODN-ZmPYL-Fa | 60 | Target site in coding strand, base replacement | Seq. ID. No. 402 |
| | | | | 5 or 8 bp away from the Cas9 cleavage site; | |
| | | | | PAM in donor ODN not removed | |
| ZmPYL-F | 22981, 23191 | ODN- ZmPYL-Fb | 60 | Target site in coding strand, base replacement | Seq. ID. No. 403 |
| | | | | 5 or 8 bp away from the Cas9 cleavage site; | |
| | | | | PAM in donor ODN removed | |
| ZmPYL-F | 22981, 23191 | ODN- ZmPYL-Fc | 77 | Target site in coding strand, base replacement | Seq. ID. No. 404 |
| | | | | 5 or 8 bp away from the Cas9 cleavage site; | |
| | | | | PAM in donor ODN removed | |
| ZmPYL-F | 22981, 23191 | ODN- ZmPYL-Fd-NT | 77 | Target site in coding strand, base replacement | Seq. ID. No. 405 |
| | | | | 5 or 8 bp away from the Cas9 cleavage site; | |
| | | | | PAM in donor ODN removed | |
| ZmPYL-F | 22981, 23191 | ODN- ZmPYL-Fd-NT-PM | 77 | Target site in coding strand, base replacement | Seq. ID. No. 406 |
| | | | | 5 or 8 bp away from the Cas9 cleavage site; | |
| | | | | PAM in donor ODN removed; ODN with | |
| | | | | phosphorothioate linkage modification | |
| ZmPYL-J | 23192 | ODN-ZmPYL-Jc short | 68 | Target site in template strand, base | Seq. ID. No. 407 |
| | | | | replacement at the Cas9 cleavage site; ODN in | |
| | | | | coding strand sequence | |
| ZmPYL-J | 23192 | ODN--ZmPYL-Jc-NT | 68 | Target site in template strand, base | Seq. ID. No. 408 |
| | | | | replacement at the Cas9 cleavage site; ODN in | |
| | | | | non-coding strand sequence | |
| ZmPYL-J | 23192 | ODN--ZmPYL-Jc-NT-PM | 68 | Target site in template strand, base | Seq. ID. No. 409 |
| | | | | replacement at the Cas9 cleavage site; ODN in | |
| | | | | non-coding strand sequence and with | |
| | | | | phosphorothioate linkage modification | |
| ZmPYL-J | 23192 | ODN--ZmPYL-Jc-long | 88 | Target site in template strand, base | Seq. ID. No. 410 |
| | | | | replacement at the Cas9 cleavage site; ODN in | |
| | | | | coding strand sequence | |

[0206] More specifically, the above described transformation vector (Table 2) expressing Cas9 and gRNA is mixed with its corresponding repair donor DNA oligonucleotides (SEQ ID NO:398 to 410) and then precipitated onto gold particles. The coated gold particles are then used to bombard immature maize embryos of elite inbred transformation variety NP2222 (DeFramond A J, et al (2013) Corn Event 5307. U.S. Pat. No. 8,466,346). Other maize genotype such as A188 and Hill can be used as bombardment target tissue source. Methods for maize immature embryo bombardment, callus induction tissue regeneration and rooting methods have been described previously except here no mannose selection is required (Wright et al., 2001, Efficient biolistic transformation of maize (Zea mays L.) and wheat (Triticum aestivum L.) using the phosphomannose isomerase gene, pmi, as the selectable marker. Plant Cell Reports 20:429-436). For example, for mutagenesis of ZmPYL-F gene mediated by CRISP-Cas9, immature embryos are isolated from harvested immature ears at about 9-12 days after pollination and pre-cultured for 3 to 5 days on osmoticum media. Pre-cultured embryos are then bombarded with DNA vector 22981 along with one of the oligonucleotides [ODN-ZmPYL-Fa, ODN-ZmPYL-Fb, ODN-ZmPYL-Fc, ODN-ZmPYL-Fd-NT or ODN-ZmPYL-Fd-NT-PM (Seq. ID. NO:402 to 406)] using BioRad PDS-1000 Biolistic particle delivery system. Bombarded embryos are then incubated in callus induction media and then moved onto mannose selection media. Selected calli are moved onto regeneration media to induce shoot formation. Shoots are then moved to rooting media. Samples are then harvested from regenerated plants for genotyping to identify plants containing the desired genomic sequence mutation that results in E164L amino acid change in the ZmPYL-F gene. Table 3 lists different experiments for targeted mutagenesis and allele replacement of different ZmPYL genes. In some experiments, gRNA and Cas9 expression vector was co-transformed with ZsGreen fluorescent protein vector 12672 for assessing gene delivery efficiency. In some other experiments, two or more gRNA expression vectors were co-delivered with two or more repair donor oligodeoxynucleotides to mutate two or ZmPYL genes simultaneously (Table 3). Table 3 shows that ZmPYL-F in a high percentage of PMI positive events (transformants) contain mutations at the intended sequences (SEQ ID NO:431: 5′-GCTCG TGATC GAGTC CTTCG/TGGTG GACGT-3′, / indicated predicted Cas9 cleavage position) targeted by gRNA-Cas9.

TABLE 3
Targeted mutagenesis and allele replacement experiments of different ZmPYL genes

| | | | | | | Number of | Number of |
|---|---|---|---|---|---|---|---|
| | | | | Total | Total | events with | putative |
| | | ODN(s) used for | | number of | number of | mutation(s) | events with |
| ZmPYL | Transformation | generating targeted | Number of | immature | PMI positive | at the target | desired allele |
| target gene | vector(s) | mutation (s) | experiments | embryos | events | site* | change |
| ZmPYL-D | 23136 | ODN-ZmPYL-Dc | 5 | 7914 | 279 | 132 | 3 |
| ZmPYL-D | 23136, | ODN-ZmPYL-Dc | 2 | 2102 | TBD | TBD | TBD |
| | 12672 | | | | | | |
| ZmPYL-D | 23189 | ODN-ZmPYL-Db | 1 | 1750 | TBD | TBD | TBD |
| ZmPYL-E | 23190 | ODN-ZmPYL-Eb | 2 | 2238 | 60** | 15 | 1 |
| | | | | | and TBD | and TBD | |
| ZmPYL-F | 22981 | ODN- ZmPYL-Fb | 6 | 5460 | 80 | 13 | TBD |
| | | | | | and TBD | and TBD | |
| ZmPYL-F | 22981, | ODN- ZmPYL-Fb | 5 | 7225 | 346 | 171 | 6 |
| | with other | | | | and TBD | and TBD | and TBD |
| | (22980, | | | | | | |
| | 22978, | | | | | | |
| | 22982)** | | | | | | |
| ZmPYL-F | 22981 | ODN- ZmPYL-Fc | 1 | 810 | TBD | TBD | TBD |
| ZmPYL-J | 23192 | ODN- ZmPYL-Jc short | 1 | 855 | TBD | TBD | TBD |
| ZmPYL-J | 23192 | ODN-ZmPYL-Jc long | 1 | 1605 | TBD | TBD | TBD |
| ZmPYL-E, | 23190, | ODN-ZmPYL-Eb, | 1 | 1785 | TBD | TBD | TBD |
| ZmPYL-F | 23191 | ODN-ZmPYL-Fc | | | | | |
| ZmPYL-F, | 23191 + | ODN-ZmPYL-Jd-S-NT, | 1 | 1970 | TBD | TBD | TBD |
| ZmPYL-J | 23192 | ODN-ZmPYL-Fd-NT | | | | | |
| ZmPYL-F, | 23191 + | ODN-ZmPYL-Jd-S-NT-PM, | 1 | 1505 | TBD | TBD | TBD |
| ZmPYL-J | 23192 | ODN-ZmPYL-Fd-NT-PM | | | | | |

Note:
*Event with both monoallelic and/or biallelic mutations;
**These vectors (22980, 22978 or 22982) carry cassettes for expression of control gRNAs (including NGG sequence) for testing specificity of gRNA for ZmPYL genes.
# TBD, to be determined; experiments are in progress and no data is available at the moment.

[0207] Sequencing of ZmPYL-F target region in selected mutants confirmed qPCR results. FIG. 13 shows sequence alignment of targeted mutations in ZmPYL-F mediated by gRNA-Cas9 expressed from vector 22981.

### 5.4 Molecular Characterization of Edited ZmPYL Mutants

[0208] Leaf samples are harvested from regenerated plants in root vessels for molecular analysis or genotyping to identify plants containing mutations at the target sequence and also containing desired sequence mutations that results in desired amino acid change in the ZmPYL genes. Targeted mutants can be identified using one of the following methods: (1) PCR amplification of the target region followed by restriction enzyme digestion and gel electrophoresis if the mutated sequence contains a restriction site (Lloyd A et al. 2005. Proc. Natl. Acad. Sci. USA 102:2232-37; Zhang F, et al. 2010. Proc. Natl. Acad. Sci. USA 107:12028-33). This method is simple, but requires the presence of suitable restriction site, thus cannot be used for most targets. (2) PCR amplification of the target region followed by Sanger sequencing or deep sequencing (Gross, E. et al. 1999. Hum. Genet. 105, 72-78. Shukla V K, et al. 2009. Nature 459:437-41. Townsend J A, et al. 2009. Nature 459:442-45.); Sequencing approach is definitive and sensitive, but takes longer time and throughput can be limited by capacity. (3) PCR amplification of the target region followed by denaturation, annealing and capillary electrophoresis (Li-Sucholeik X C, et al. 1999. Electrophoresis 20, 1224-1232; Larsen L A, et al. 1999. Hum. Mutat. 13, 318-327) or denaturing high-performance liquid chromatography to detect base pair changes by heteroduplex analysis (McCallum C M, et al. 2000. Nature Biotechnology 18, 455-457); these methods are limited by throughput and the identified mutations need to be further verified by sequencing. (4) PCR amplification of the target region followed by denaturation, heteroduplex formation/strand annealing, digestion with mismatch-specific nuclease (such as CEL1 and T7 endonuclease) and gel electrophoresis (Oleykowski, C. A. et al. 1998. Nucleic Acids Res. 26, 4597-4602. Colbert et al. 2001. Plant Physiol. 126:480-484; Lombardo A, et al. 2007. Nat. Biotechnol. 25:1298-306), for example using the commercially available Surveyer™ nuclease assay kit (Transgenomic, Gaithersburg, Md., USA; Qiu, P., et al. 2004. BioTechniques 36, 702-707). However, the gel-based assays are not as sensitive as high-throughput DNA sequencing and can only detect mutation with frequency of 1% or more. All of the above 4 approaches of identifying a potential mutant in a target site are based on the presence of a new signal in a qualitative fashion, either a new band in a gel or a new peak in a chromatogram that is different from the wild type reference sequence.

[0209] We have developed an alternative high throughput assay method for identification of plants with any site-directed mutation at the targeted sequences based on qPCR (Syngenta Provisional Patent Application #9207-137PR, case 80484). The method measures the reduction of the wild type target site sequence in cells or tissues that have been treated with a site-directed nuclease in a quantitative fashion in comparison with a reference sample. Typically, a Taqman-based assay is used for quantification of the target sequence copy numbers. For detecting potential events with desired allele replacement, an additional high throughput end-point assay is designed and performed. In this end point assay, signals from two MGB probes are used to determine the presence of WT or expected mutant allele as shown in FIG. 12. Events with putative allele replacement are selected based on both Taqman copy number assay (WT target sequence copy number) and end point assay (mutant copy number) results. Putative events with putative allele replacement are further confirmed by DNA sequence analysis of amplified target locus sequences. Table 4 shows the qPCR and end point assay results of selected number of regerated maize plants generated from biolistic transformation experiment of vector 22981 (FIG. 10A-10B) co-delivered with oligonucleotide ODN-ZmPYL-Fb (Seq. ID. No. 402). As shown in Table 4, transformation vector-specific assays were performed to determine if there is any transgene insertion (cCas9-01 and cPMI-09 qPCR assays). qPCR assay (ZmPYL-F cutting site) was also performed to determine the copy number of the ZmPYL-F maize genomic target site sequence (5′-GCTCG TGATC GAGTC CTTCG/TGG-3′, SEQ ID NO:394). Finally, an end point assay (ZmPYL-F E164L) was also used to determine if plants have intended sequence mutation (from GAG to CTG) resulting in E164L amino acid residue change. For example, plant MZET151104A015A has a single copy of transgene insertion (for Cas9 and PMI genes), biallelic mutations at the target sequence since ZmPYL-F cutting site copy call is 0 (in WT, the copy call should be 2) and no E164L mutation. Another plant MZET151104A125A has more than 2 copies of transformation vector (22981) insertion and only one copy of the ZmPYL-F cutting site is mutated. But plant MZET151104A125A is positive for end point assay for detecting ZmPYL-F E164L mutation. This event is thus a candidate event with ZmPYL-F E164L mutation. Candidate events MZET151104A125A, MZET151104A174A and MZET151104A180A in Table 4 are then further confirmed by sequencing analysis of PCR-amplified ZmPYL-F genome sequences.

TABLE 4
qPCR and end point assay results of regenerated maize events

| | | | | Assay s for genomic | | |
|---|---|---|---|---|---|---|
| | | | | target sequence | | |
| | | Assays for transgene vector | | ZmPYL-F | | |
| | | cCas9-01 | cPMI-09 | cutting site | ZmPYL-F | |
| | Assay name | (qPCR) | (qPCR) | (qPCR) | E164L | |
| | (Type) | Copy | Copy | Copy | (End point) | Candidate |
| Plant ID | Construct ID | number | number | number | Null/Het/Hom | event |
| MZET151104A015A | 22981 | 1 | 1 | 0 | Null | |
| MZET151104A017A | 22981 | 1 | 1 | 1 | Null | |
| MZET151104A019A | 22981 | >2 | >2 | 0 or 1 | Null | |
| MZET151104A021A | 22981 | 1 | 1 | 1 | Null | |
| MZET151104A125A | 22981 | >2 | 2 | 1 | Het | Yes |
| MZET151104A126A | 22981 | >2 | >2 | 1 | Null | |
| MZET151104A132A | 22981 | 1 | 1 or 2 | 1 or 2 | Null | |
| MZET151104A138A | 22981 | 1 | 1 | 0 | Null | |
| MZET151104A141A | 22981 | 1 or 2 | 1 | 0 | Null | |
| MZET151104A158A | 22981 | >2 | 2 | 1 | Null | |
| MZET151104A174A | 22981 | >2 | >2 | 1 | Het | Yes |
| MZET151104A178A | 22981 | >2 | 1 | 1 | Null | |
| MZET151104A180A | 22981 | >2 | 1 | 1 | Het | Yes |
| MZET151104A186A | 22981 | >2 | >2 | 0 or 1 | Null | |
| MZET151104A195A | 22981 | >2 | >2 | 0 | Null | |
| MZET151104A201A | 22981 | 0 | 0 | 1 | Null | |

### 5.5 Evaluation of ZmPYL Gene Edited Mutants

[0210] ZmPYL gene edited mutants are tested as described for transgenic T6PP maize plants (Nuccio et al., 2015, Nature Biotechnology, doi:10.1038/nbt.3277) with managed stress environment (MSE) trials. Mutant lines that show improved plant response to water deficit are further tested in multiple location agronomic equivalency (Ag Eq) trials with mutant lines grown alongside control plants and using a checkerboard plot layout.

```
PYL-E V89A
(SEQ ID NO: 389)
Met Val Gly Leu Val Gly Gly Ser Thr Ala Arg Ala Glu His Val Val
  1 5 10 15
Ala Asn Ala Gly Gly Glu Ala Glu Tyr Val Arg Arg Met His Arg His
                        20 25 30
Ala Pro Thr Glu His Gln Cys Thr Ser Thr Leu Val Lys His Ile Lys
                35 40 45
Ala Pro Val His Leu Val Trp Glu Leu Val Arg Arg Phe Asp Gln Pro
        50 55 60
Gln Arg Tyr Lys Pro Phe Val Arg Asn Cys Val Val Arg Gly Asp Gln
65 70 75 80
Leu Glu Val Gly Ser Leu Arg Asp Ala Asn Val Lys Thr Gly Leu Pro
                                85 90 95
Ala Thr Thr Ser Thr Glu Arg Leu Glu Gln Leu Asp Asp Asp Leu His
                        100 105 110
Ile Leu Gly Val Lys Phe Val Gly Gly Asp His Arg Leu Gln Asn Tyr
                115 120 125
Ser Ser Ile Ile Thr Val His Pro Glu Ser Ile Asp Gly Arg Pro Gly
        130 135 140
Thr Leu Val Ile Glu Ser Phe Val Val Asp Val Pro Asp Gly Asn Thr
145 150 155 160
Lys Asp Glu Thr Cys Tyr Phe Val Glu Ala Val Ile Lys Cys Asn Leu
                                165 170 175
Asn Ser Leu Ala Glu Val Ser Glu Gln Leu Ala Val Glu Ser Pro Thr
                        180 185 190
Ser Leu Ile Asp Gln
                195
PYL-E V89A E149L
(SEQ ID NO: 390)
Met Val Gly Leu Val Gly Gly Ser Thr Ala Arg Ala Glu His Val Val
  1 5 10 15
Ala Asn Ala Gly Gly Glu Ala Glu Tyr Val Arg Arg Met His Arg His
                        20 25 30
Ala Pro Thr Glu His Gln Cys Thr Ser Thr Leu Val Lys His Ile Lys
                35 40 45
Ala Pro Val His Leu Val Trp Glu Leu Val Arg Arg Phe Asp Gln Pro
        50 55 60
Gln Arg Tyr Lys Pro Phe Val Arg Asn Cys Val Val Arg Gly Asp Gln
65 70 75 80
Leu Glu Val Gly Ser Leu Arg Asp Ala Asn Val Lys Thr Gly Leu Pro
                                85 90 95
Ala Thr Thr Ser Thr Glu Arg Leu Glu Gln Leu Asp Asp Asp Leu His
                        100 105 110
Ile Leu Gly Val Lys Phe Val Gly Gly Asp His Arg Leu Gln Asn Tyr
                115 120 125
Ser Ser Ile Ile Thr Val His Pro Glu Ser Ile Asp Gly Arg Pro Gly
        130 135 140
Thr Leu Val Ile Leu Ser Phe Val Val Asp Val Pro Asp Gly Asn Thr
145 150 155 160
Lys Asp Glu Thr Cys Tyr Phe Val Glu Ala Val Ile Lys Cys Asn Leu
                                165 170 175
Asn Ser Leu Ala Glu Val Ser Glu Gln Leu Ala Val Glu Ser Pro Thr
                        180 185 190
Ser Leu Ile Asp Gln
                195
PYL-E V89I E149L
(SEQ ID NO: 391)
Met Val Gly Leu Val Gly Gly Ser Thr Ala Arg Ala Glu His Val Val
  1 5 10 15
Ala Asn Ala Gly Gly Glu Ala Glu Tyr Val Arg Arg Met His Arg His
                        20 25 30
Ala Pro Thr Glu His Gln Cys Thr Ser Thr Leu Val Lys His Ile Lys
                35 40 45
Ala Pro Val His Leu Val Trp Glu Leu Val Arg Arg Phe Asp Gln Pro
        50 55 60
Gln Arg Tyr Lys Pro Phe Val Arg Asn Cys Val Val Arg Gly Asp Gln
65 70 75 80
Leu Glu Val Gly Ser Leu Arg Asp Ile Asn Val Lys Thr Gly Leu Pro
                                85 90 95
Ala Thr Thr Ser Thr Glu Arg Leu Glu Gln Leu Asp Asp Asp Leu His
                        100 105 110
Ile Leu Gly Val Lys Phe Val Gly Gly Asp His Arg Leu Gln Asn Tyr
                115 120 125
Ser Ser Ile Ile Thr Val His Pro Glu Ser Ile Asp Gly Arg Pro Gly
        130 135 140
Thr Leu Val Ile Leu Ser Phe Val Val Asp Val Pro Asp Gly Asn Thr
145 150 155 160
Lys Asp Glu Thr Cys Tyr Phe Val Glu Ala Val Ile Lys Cys Asn Leu
                                165 170 175
Asn Ser Leu Ala Glu Val Ser Glu Gln Leu Ala Val Glu Ser Pro Thr
                        180 185 190
Ser Leu Ile Asp Gln
                195
PYL-E V89Y E149L
(SEQ ID NO: 392)
Met Val Gly Leu Val Gly Gly Ser Thr Ala Arg Ala Glu His Val Val
  1 5 10 15
Ala Asn Ala Gly Gly Glu Ala Glu Tyr Val Arg Arg Met His Arg His
                        20 25 30
Ala Pro Thr Glu His Gln Cys Thr Ser Thr Leu Val Lys His Ile Lys
                35 40 45
Ala Pro Val His Leu Val Trp Glu Leu Val Arg Arg Phe Asp Gln Pro
        50 55 60
Gln Arg Tyr Lys Pro Phe Val Arg Asn Cys Val Val Arg Gly Asp Gln
65 70 75 80
Leu Glu Val Gly Ser Leu Arg Asp Tyr Asn Val Lys Thr Gly Leu Pro
                                85 90 95
Ala Thr Thr Ser Thr Glu Arg Leu Glu Gln Leu Asp Asp Asp Leu His
                        100 105 110
Ile Leu Gly Val Lys Phe Val Gly Gly Asp His Arg Leu Gln Asn Tyr
                115 120 125
Ser Ser Ile Ile Thr Val His Pro Glu Ser Ile Asp Gly Arg Pro Gly
        130 135 140
Thr Leu Val Ile Leu Ser Phe Val Val Asp Val Pro Asp Gly Asn Thr
145 150 155 160
Lys Asp Glu Thr Cys Tyr Phe Val Glu Ala Val Ile Lys Cys Asn Leu
                                165 170 175
Asn Ser Leu Ala Glu Val Ser Glu Gln Leu Ala Val Glu Ser Pro Thr
                        180 185 190
Ser Leu Ile Asp Gln
                195
ODN-ZmPYL-Dc
(SEQ ID NO: 398)
AGGTC ATCGA CGGCC GGCCA GGGAC GCTCG TCATC CTGTC ATTCG TCGTC GACGT CCCCG ACGGC
AACAC CAAGG
ODN-ZmPYL-Dd-NT
(SEQ ID NO: 399)
CCTTG GTGTT GCCGT CGGGG ACGTC GACGA CGAAT GACAG GATGA CGAGC GTCCC TGGCC GGCCG
TCGAT GACCT
ODN-ZmPYL-Dd-NT-PM
* denotes phosphorothioate modification
(SEQ ID NO: 400)
C*C*T*T GGTGT TGCCG TCGGG GACGT CGACG ACGAA TGACA GGATG ACGAG CGTCC CTGGC
CGGCC GTCGA TGA*C*C *T
ODN-ZmPYL-Db
(SEQ ID NO: 401)
CCATC CTCAC CGTCC ACCCG GAGGT CATCG ACGGC CGACC AGGGA CGCTC GTCAT CCTGT CCTTC
GTCGT CGACG TCCCC GACGG CAA
ODN-ZmPYL-Fa
(SEQ ID NO: 402)
CGACG GCCGA CCGGG GACGC TCGTG ATCCT GTCCT TCGTG GTGGA CGTCC CCGAC GGCAA
ODN-ZmPYL-Fb
(SEQ ID NO: 403)
CGACG GCCGA CCGGG GACGC TCGTG ATCCT GTCCT TCGTA GTGGA CGTCC CCGAC GGCAA
ODN-ZmPYL-Fc
(SEQ ID NO: 404)
AGGTC ATCGA CGGCC GACCG GGGAC GCTCG TGATC CTGTC CTTCG TAGTG GACGT CCCCG ACGGC
AACAC CAAGG AC
ODN-ZmPYL-Fd-NT
(SEQ ID NO: 405)
GTCCT TGGTG TTGCC GTCGG GGACG TCCAC TACGA AGGAC AGGAT CACGA GCGTC CCCGG TCGGC
CGTCG ATGAC CT
ODN-ZmPYL-Fd-NT-PM
* denotes phosphorothioate modification
(SEQ ID NO: 406)
G*T*C*CT TGGTG TTGCC GTCGG GGACG TCCAC TACGA AGGAC AGGAT CACGA GCGTC CCCGG
TCGGC CGTCG ATGA*C* C*T
ODN-ZmPYL-Jc short
(SEQ ID NO: 407)
CACCG AGTTC CAGCC GGGCC CCTAC TGCGT CGTGC TCCTG TCCTA CGTCG TCGAC GTCCC CGACG
GCA
ODN-ZmPYL-Jc short-NT
(SEQ ID NO: 408)
TGCCG TCGGG GACGT CGACG ACGTA GGACA GGAGC ACGAC GCAGT AGGGG CCCGG CTGGA ACTCG
GTG
ODN-ZmPYL-Jc short-NT-PM
* denotes phosphorothioate modification
(SEQ ID NO: 409)
T*G*C*CG TCGGG GACGT CGACG ACGTA GGACA GGAGC ACGAC GCAGT AGGGG CCCGG CTGGA
ACTCG *G*T*G
ODN-ZmPYL-Jc long
(SEQ ID NO: 410)
TCACC TCCGT CACCG AGTTC CAGCC GGGCC CCTAC TGCGT CGTGC TCCTG TCCTA CGTCG TCGAC
GTCCC CGACG GCAAC ACCGA GGA
```

[0211] It is understood that the examples and embodiments described herein are for illustrative purposes only and that various modifications or changes in light thereof will be suggested to persons skilled in the art and are to be included within the spirit and purview of this application and scope of the appended claims. All publications, patents, and patent applications cited herein are hereby incorporated by reference in their entirety for all purposes.

What is claimed is:

1. An isolated nucleic acid comprising a polynucleotide encoding a mutated PYR/PYL receptor polypeptide comprising an amino acid substitution corresponding to the amino acid V81, 1110, E141, and A160 in PYR1 as set forth in SEQ ID NO:1, wherein the mutated PYR/PYL receptor has increased sensitivity to abscisic acid compared to a control PYR/PYL receptor lacking the substitution.

2. The isolated nucleic acid of claim 1, wherein the PYR/PYL receptor polypeptide comprises an amino acid substitution corresponding to the amino acid V81 and the amino acid substitution is selected from I and Y.

3. The isolated nucleic acid of claim 1, wherein the PYR/PYL receptor polypeptide comprises an amino acid substitution corresponding to the amino acid I110 and the amino acid substitution is selected from C and S.

4. The isolated nucleic acid of claim 1, wherein the PYR/PYL receptor polypeptide comprises an amino acid substitution corresponding to the amino acid E141 and the amino acid substitution is selected from C, I, L, M, N, T, V, W, and Y.

5. The isolated nucleic acid of claim 4, wherein the mutated PYR/PYL receptor polypeptide comprises an amino acid sequence at least 95% identical to SEQ ID NO:153.

6. The isolated nucleic acid of claim 4, wherein the mutated PYR/PYL receptor polypeptide comprises SEQ ID NO: 389, 390, 391, or 392.

7. The isolated nucleic acid of claim 1, wherein the PYR/PYL receptor polypeptide comprises an amino acid substitution corresponding to the amino acid A160 and the amino acid substitution is selected from C and I.

8. The isolated nucleic acid of claim 1, wherein the mutated PYR/PYL receptor polypeptide is substantially identical to any of SEQ ID NOs:1-119 or SEQ ID NOs:155-361 or comprises any of SEQ ID NOs: 120-123.

9. The isolated nucleic acid of claim 1, wherein the polynucleotide encodes a fusion protein, the fusion protein comprising the mutated PYR/PYL receptor polypeptide and a fusion partner protein.

10. The isolated nucleic acid of claim 9, wherein the fusion partner protein is a transcriptional activation or modulation domain.

11. The isolated nucleic acid of claim 10, wherein the transcriptional activator is VP16 or VP64.

12. The isolated nucleic acid of claim 9, wherein the fusion protein further comprises a nuclear localization signal sequence.

13. A plant comprising the polynucleotide of claim 1.

14. The plant of claim 13, wherein the polynucleotide is an in situ mutated endogenous polynucleotide.

15. A method of producing a plant having increased sensitivity to abscisic acid, the method comprising:
introducing a mutation into a polynucleotide encoding a PYR/PYL polypeptide, wherein the mutation results in the polynucleotide of claim 1.

The application's sequence listing, which the Patent Office published only in electronic form, follows.

SEQUENCE LISTING (431 sequences)

SEQ ID NO: 1 - protein, 191 aa, Arabidopsis thaliana
MPSELTPEERSELKNSIAEFHTYQLDPGSCSSLHAQRIHAPPELVWSIVRRFDKPQTYKHFIKSCSVEQNFEMRVGCTRDVIVISGLPANTSTERLDILDDERRVTGFSIIGGEHRLTNYKSVTTVHRFEKENRIWTVVLESYVVDMPEGNSEDDTRMFADTVVKLNLQKLATVAEAMARNSGDGSGSQVT

SEQ ID NO: 2 - protein, 221 aa, Arabidopsis thaliana
MANSESSSSPVNEEENSQRISTLHHQTMPSDLTQDEFTQLSQSIAEFHTYQLGNGRCSSLLAQRIHAPPETVWSVVRRFDRPQIYKHFIKSCNVSEDFEMRVGCTRDVNVISGLPANTSRERLDLLDDDRRVTGFSITGGEHRLRNYKSVTTVHRFEKEEEEERIWTVVLESYVVDVPEGNSEEDTRLFADTVIRLNLQKLASITEAMNRNNNNNNSSQVR

SEQ ID NO: 3 - protein, 190 aa, Arabidopsis thaliana
MSSSPAVKGLTDEEQKTLEPVIKTYHQFEPDPTTCTSLITQRIHAPASVVWPLIRRFDNPERYKHFVKRCRLISGDGDVGSVREVTVISGLPASTSTERLEFVDDDHRVLSFRVVGGEHRLKNYKSVTSVNEFLNQDSGKVYTVVLESYTVDIPEGNTEEDTKMFVDTVVKLNLQKLGVAATSAPMHDDE

SEQ ID NO: 4 - protein, 209 aa, Arabidopsis thaliana
MNLAPIHDPSSSSTTTTSSSTPYGLTKDEFSTLDSIIRTHHTFPRSPNTCTSLIAHRVDAPAHAIWRFVRDFANPNKYKHFIKSCTIRVNGNGIKEIKVGTIREVSVVSGLPASTSVEILEVLDEEKRILSFRVLGGEHRLNNYRSVTSVNEFVVLEKDKKKRVYSVVLESYIVDIPQGNTEEDTRMFVDTVVKSNLQNLAVISTASPT

SEQ ID NO: 5 - protein, 207 aa, Arabidopsis thaliana
MLAVHRPSSAVSDGDSVQIPMMIASFQKRFPSLSRDSTAARFHTHEVGPNQCCSAVIQEISAPISTVWSVVRRFDNPQAYKHFLKSCSVIGGDGDNVGSLRQVHVVSGLPAASSTERLDILDDERHVISFSVVGGDHRLSNYRSVTTLHPSPISGTVVVESYVVDVPPGNTKEETCDFVDVIVRCNLQSLAKIAENTAAESKKKMSL

SEQ ID NO: 6 - protein, 203 aa, Arabidopsis thaliana
MRSPVQLQHGSDATNGFHTLQPHDQTDGPIKRVCLTRGMHVPEHVAMHHTHDVGPDQCCSSVVQMIHAPPESVWALVRRFDNPKVYKNFIRQCRIVQGDGLHVGDLREVMVVSGLPAVSSTERLEILDEERHVISFSVVGGDHRLKNYRSVTTLHASDDEGTVVVESYIVDVPPGNTEEETLSFVDTIVRCNLQSLARSTNRQ

SEQ ID NO: 7 - protein, 215 aa, Arabidopsis thaliana
MPTSIQFQRSSTAAEAANATVRNYPHHHQKQVQKVSLTRGMADVPEHVELSHTHVVGPSQCFSVVVQDVEAPVSTVWSILSRFEHPQAYKHFVKSCHVVIGDGREVGSVREVRVVSGLPAAFSLERLEIMDDDRHVISFSVVGGDHRLMNYKSVTTVHESEEDSDGKKRTRVVESYVVDVPAGNDKEETCSFADTIVRCNLQSLAKLAENTSKFS

SEQ ID NO: 8 - protein, 211 aa, Arabidopsis thaliana
MEMIGGDDTDTEMYGALVTAQSLRLRHLHHCRENQCTSVLVKYIQAPVHLVWSLVRRFDQPQKYKPFISRCTVNGDPEIGCLREVNVKSGLPATTSTERLEQLDDEEHILGINIIGGDHRLKNYSSILTVHPEMIDGRSGTMVMESFVVDVPQGNTKDDTCYFVESLIKCNLKSLACVSERLAAQDITNSIATFCNASNGYREKNHTETNL

SEQ ID NO: 9 - protein, 188 aa, Arabidopsis thaliana
MEANGIENLTNPNQEREFIRRHHKHELVDNQCSSTLVKHINAPVHIVWSLVRRFDQPQKYKPFISRCVVKGNMEIGTVREVDVKSGLPATRSTERLELLDDNEHILSIRIVGGDHRLKNYSSIISLHPETIEGRIGTLVIESFVVDVPEGNTKDETCYFVEALIKCNLKSLADISERLAVQDTTESRV

SEQ ID NO: 10 - protein, 187 aa, Arabidopsis thaliana
MMDGVEGGTAMYGGLETVQYVRTHHQHLCRENQCTSALVKHIKAPLHLVWSLVRRFDQPQKYKPFVSRCTVIGDPEIGSLREVNVKSGLPATTSTERLELLDDEEHILGIKIIGGDHRLKNYSSILTVHPEIIEGRAGTMVIESFVVDVPQGNTKDETCYFVEALIRCNLKSLADVSERLASQDITQ

SEQ ID NO: 11 - protein, 183 aa, Arabidopsis thaliana
MNGDETKKVESEYIKKHHRHELVESQCSSTLVKHIKAPLHLVWSIVRRFDEPQKYKPFISRCVVQGKKLEVGSVREVDLKSGLPATKSTEVLEILDDNEHILGIRIVGGDHRLKNYSSTISLHSETIDGKTGTLAIESFVVDVPEGNTKEETCFFVEALIQCNLNSLADVTERLQAESMEKKI

SEQ ID NO: 12 - protein, 161 aa, Arabidopsis thaliana
METSQKYHTCGSTLVQTIDAPLSLVWSILRRFDNPQAYKQFVKTCNLSSGDGGEGSVREVTVVSGLPAEFSRERLDELDDESHVMMISIIGGDHRLVNYRSKTMAFVAADTEEKTVVVESYVVDVPEGNSEEETTSFADTIVGFNLKSLAKLSERVAHLKL

SEQ ID NO: 13 - protein, 159 aa, Arabidopsis thaliana
MKTSQEQHVCGSTVVQTINAPLPLVWSILRRFDNPKTFKHFVKTCKLRSGDGGEGSVREVTVVSDLPASFSLERLDELDDESHVMVISIIGGDHRLVNYQSKTTVFVAAEEEKTVVVESYVVDVPEGNTEEETTLFADTIVGCNLRSLAKLSEKMMELT

SEQ ID NO: 14 - protein, 164 aa, Arabidopsis thaliana
MESSKQKRCRSSVVETIEAPLPLVWSILRSFDKPQAYQRFVKSCTMRSGGGGGKGGEGKGSVRDVTLVSGFPADFSTERLEELDDESHVMVVSIIGGNHRLVNYKSKTKVVASPEDMAKKTVVVESYVVDVPEGTSEEDTIFFVDNIIRYNLTSLAKLTKKMMK

SEQ ID NO: 15 - protein, 191 aa, Brassica oleracea
MPSQLTPEERSELAQSIAEFHTYHLGPGSCSSLHAQRIHAPPEIVWSVVRRFDKPQTYKHFIKSCSVEDGFEMRVGCTRAVNVISGLPANTSTERLDILDDERRVTGFSIIGGEHRLTNYKSVTTVHRFEKERRIWTVVLESYVVDMPEGNSEDDTRMFADTVVKLNLQKLATVTEAMARNAGDGSGAQVT

SEQ ID NO: 16 - protein, 281 aa, Brassica oleracea
MPSELTQEERSKLTQSISEFHTYHLGPGSCSSLHAQRIHAPPEIVWSVVRQFDKPQTYKHFIKSCSVEEGFEMRVGCTRDVIVISGLPANTSTERLDMLDDERRVTGFSIIGGEHRLKNYKSVTTVHRFERERRIWTVVLESYVVDMPEGNSEDDTRMFADTVVKLNLQKLATVTEAMARNAGDGRGSRETTCRESFHLITAFEKQRQITEPTVYQNPPYHTGMTPEPRTSTVFIELEDHRTLPGNLTPTTEEHLQRMYQRFWGIRQLQRPRQSFGERQSI

SEQ ID NO: 17 - protein, 453 aa, Vitis vinifera
MQMKYLEGKQNLMEEKGEKQCIPMDLAVREAQFKGSLLDRITWLEQRLHKLSLQLETRSKQQPHPSRMQTAGETSSRHGPKKELSCSFPVFSTRNHNHGHKQTSQFHVPRFEYQEGGRENPAVVITKLTPFHHPKIITILFPISNYFIIFFFLTFDTKKQYPLLFPILPSRFLPISHLITQEIEKYKTSSHFSSPASLFAAMNKAETSSMAEAESEDSETTTPTTHHLTIPPGLTQPEFQELAHSISEFHTYQVGPGQCSSLLAQRVHAPLPTVWSVVRRFDKPQTYKHFIKSCHVEDGFEMRVGCLRDVNVISGLPAETSTERLDILDDERHVTGFSIIGGEHRLRNYRSVTTNHGGEIWTVVLESYVVDMPEGNTEEDTRLFADTVVKLNLQKLASVTEVSQSCNYPCQFHIIENEDIQPEEMNLGVLTTSIEEQRKKKRVVAMKDGSTSS

SEQ ID NO: 18 - protein, 195 aa, Vitis vinifera
  VARIANT (193)..(193): Xaa = any amino acid
MAEAESEDSETTTPTTHHLTIPPGLTQPEFQELAHSISEFHTYQVGPGQCSSLLAQRVHAPLPTVWSVVRRFDKPQTYKHFIKSCHVEDGFEMRVGCLRDVNVISGLPAETSTERLDILDDERHVTGFSIIGGEHRLRNYRSVTTVHEYQNHGGEIWTVVLESYVVDMPEGNTEEDTRLFADTVVKLNLSEAXRR

SEQ ID NO: 19 - protein, 217 aa, Medicago truncatula
  MISC_FEATURE (1)..(217)
MEKAESSTASTSDQDSDENHRTQHHLTLPSGLRQHEFDSLIPFINSHHTYLIGPNQCSTLLAQRIHAPPQTVWSVVRSFDKPQIYKHIIKSCSLKEGFQMKVGCTRDVNVISGLPAATSTERLDVLDDERRVTGFSIIGGEHRLKNYRSVTSVHGFGDGDNGGEIWTVVLESYVVDVPEGNTEEDTRLFADTVVKLNLQKLASVTEGKNRDGDGKSH

SEQ ID NO: 20 - protein, 212 aa, Oryza sativa
MEQQEEVPPPPAGLGLTAEEYAQVRATVEAHHRYAVGPGQCSSLLAQRIHAPPAAVWAVVRRFDCPQVYKHFIRSCVLRPDPHHDDNGNDLRPGRLREVSVISGLPASTSTERLDLLDDAHRVFGFTITGGEHRLRNYRSVTTVSQLDEICTLVLESYIVDVPDGNTEDDTRLFADTVIRLNLQKLKSVSEANANAAAAAAAPPPPPPAAAE

SEQ ID NO: 21 - protein, 212 aa, Zea mays
MDQQGAGGDAEVPAGLGLTAAEYEQLRSTVDAHHRYAVGEGQCSSLLAQRIHAPPEAVWAVVRRFDCPQVYKHFIRSCALRPDPEAGDALCPGRLREVSVISGLPASTSTERLDLLDDAARVFGFSITGGEHRLRNYRSVTTVSELAVPAICTVVLESYVVDVPDGNTEDDTRLFADTVIRLNLQKLKSVAEANAAEAAATTNSVLLPRPAE

SEQ ID NO: 22 - protein, 212 aa, Zea mays
  VARIANT (11)..(11): Xaa = any amino acid
MDQQGAGGDAXVPAGLGLTAAEYEQLRSTVDAHHRYAVGEGQCSSLLAQRIHAPPEAVWAVVRRFDCPQVYKHFIRSCALRPDPEAGDALCPGRLREVSVISGLPASTSTERLDLLDDAARVFGFSITGGEHRLRNYRSVTTVSELADPAICTVVLESYVVDVPDGNTEDDTRLFADTVIRLNLQKLKSVTEANAAEAAATTNSVLLPRPAE

SEQ ID NO: 23 - protein, 233 aa, Vitis vinifera
MDPHHHHGLTEEEFRALEPIIQNYHTFEPSPNTCTSLITQKIDAPAQVVWPFVRSFENPQKYKHFIKDCTMRGDGGVGSIREVTVVSGLPASTSTERLEILDDEKHILSFRVVGGEHRLNNYRSVTSVNDFSKEGKDYTIVLESYIVDIPEGNTGEDTKMFVDTVVKLNLQKLAVVAITSLHENEEIADNEGPSREISLQSETESAERGDERRDGDGPSKACNRNEWHCTTKE

SEQ ID NO: 24 - protein, 207 aa, Oryza sativa
MEPHMERALREAVASEAERRELEGVVRAHHTFPAAERAAGPGRRPTCTSLVAQRVDAPLAAVWPIVRGFANPQRYKHFIKSCELAAGDGATVGSVREVAVVSGLPASTSTERLEILDDDRHVLSFRVVGGDHRLRNYRSVTSVTEFSSPSSPPRPYCVVVESYVVDVPEGNTEEDTRMFTDTVVKLNLQKLAAVATSSSPPAAGNHH

SEQ ID NO: 25 - protein, 210 aa, Oryza sativa
MEPHMERALREAVASEAERRELEGVVRAHHTFPAAERAAGPGRRPTCTSLVAQRVDAPLAAVWPIVRGFANPQRYKHFIKSCELAAGDGATVGSVREVAVVSGLPASTSTERLEILDDDRHVLSFRVVGGDHRLRNYRSVTSVTEFSSPSSPPSPPRPYCVVVESYVVDVPEGNTEEDTRMFTDTVVKLNLQKLAAVATSSSPPAAGNHH

SEQ ID NO: 26 - protein, 200 aa, Zea mays
MPYTAPRPSPQQHSRVLSGGGAKAASHGASCAAVPAEVARHHEHAARAGQCCSAVVQAIAAPVGAVWSVVRRFDRPQAYKHFIRSCRLVGGGDVAVGSVREVRVVSGLPATSSRERLEILDDERRVLSFRVVGGEHRLANYRSVTTVHEAGAGAGTGTVVVESYVVDVPHGNTADETRVFVDTIVRCNLQSLARTAERLA

SEQ ID NO: 27 - protein, 215 aa, Vitis vinifera
MPSNPPKSSLVVHRINSPNSITTATTASAAANNHNTSTMPPHKQVPDAVSRHHTHVVGPNQCCSAVVQQIAAPVSTVWSVVRRFDNPQAYKHFVKSCHVVVGDGDVGTLREVHVISGLPAANSTERLEILDDERHVLSFSVIGGDHRLSNYRSVTTLHPSPSSTGTVVLESYVVDIPPGNTKEDTCVFVDTIVRCNLQSLAQIAENAAGCKRSSS

SEQ ID NO: 28 - protein, 213 aa, Nicotiana tabacum
MPPSSPDSSVLLQRISSNTTPDFACKQSQQLQRRTMPIPCTTQVPDSVVRFHTHPVGPNQCCSAVIQRISAPVSTVWSVVRRFDNPQAYKHFVKSCHVIVGDGDVGTLREVRVISGLPAASSTERLEILDDERHVISFSVVGGDHRLANYRSVTTLHPEPSGDGTTIVVESYVVDVPPGNTRDETCVFVDTIVKCNLTSLSQIAVNVNRRKDS

SEQ ID NO: 29 - protein, 208 aa, Oryza sativa
MPYAAVRPSPPPQLSRPIGSGAGGGKACPAVPCEVARYHEHAVGAGQCCSTVVQAIAAPADAVWSVVRRFDRPQAYKKFIKSCRLVDGDGGEVGSVREVRVVSGLPATSSRERLEVLDDDRRVLSFRIVGGEHRLANYRSVTTVHEAAAPAMAVVVESYVVDVPPGNTWEETRVFVDTIVRCNLQSLARTVERLAPEAPRANGSIDHA

SEQ ID NO: 30 - protein, 208 aa, Oryza sativa
MPYAAVRPSPPPQLSRPIGSGAGGGKACPAVPCEVARYHEHAVGAGQCFSTVVQAIAAPADAVWSVVRRFDRPQAYKKFIKSCRLVDGDGGEVGSVREVRVVSGLPATSSRERLEVLDDDRRVLSFRIVGGEHRLANYRSVTTVHEAAAPAMAVVVESYVVDVPPGNTWEETRVFVDTIVRCNLQSLARTVERLAPEAPRANGSIDHA

SEQ ID NO: 31 - protein, 213 aa, Picea sitchensis
MDIIAGFDQLSFRLSGASKQITKTGAVQYLKGEEGYGEWLKEVMGRYHYHSHDGARECRCSSVVVQQVEAPVSVVWSLVRRFDQPQVYKHFVSNCFMRGDLKVGCLREVRVVSGLPAATSTERLDILDEERHILSFSIVGGDHRLNNYRSITTLHETLINGKPGTIVIESYVLDVPHGNTKEETCLFVDTIVKCNLQSLAHVSNHLNSTHRCL

SEQ ID NO: 32 - protein, 207 aa, Oryza sativa
MEAHVERALREGLTEEERAALEPAVMAHHTFPPSTTTATTAAATCTSLVTQRVAAPVRAVWPIVRSFGNPQRYKHFVRTCALAAGDGASVGSVREVTVVSGLPASTSTERLEMLDDDRHIISFRVVGGQHRLRNYRSVTSVTEFQPPAAGPGPAPPYCVVVESYVVDVPDGNTAEDTRMFTDTVVKLNLQMLAAVAEDSSSASRRRD

SEQ ID NO: 33 - protein, 216 aa, Oryza sativa
MPYTAPRPSPPQHSRIGGCGGGGVLKAAGAAGHAASCVAVPAEVARHHEHAAGVGQCCSAVVQAIAAPVDAVWSVVRRFDRPQAYKHFIRSCRLLDGDGDGGAVAVGSVREVRVVSGLPATSSRERLEILDDERRVLSFRVVGGEHRLSNYRSVTTVHETAAGAAAAVVVESYVVDVPHGNTADETRMFVDTIVRCNLQSLARTAEQLALAAPRAA

SEQ ID NO: 34 - protein, 212 aa, Vitis vinifera
MPSSLQLHRINNIDPTTVAVAATAAVNCHKQSRTPLRCATPVPDAVASYHAHAVGPHQCCSMVVQTTAAALPTVWSVVRRFDNPQAYKHFLKSCHVIFGDGDIGTLREVHVVSGLPAESSTERLEILDDERHVLSFSVVGGDHRLCNYRSVTTLHPSPTGTGTVVVESYVVDIPPGNTKEDTCVFVDTIVKCNLQSLAQMSEKLTNNNRNSS

SEQ ID NO: 35 - protein, 218 aa, Zea mays
MPCLQASSPGSMPYQHHGRGVGCAAEAGAAVGASAGTGTRCGAHDGEVPAEAARHHEHAAPGPGRCCSAVVQRVAAPAEAVWSVVRRFDQPQAYKRFVRSCALLAGDGGVGTLREVRVVSGLPAASSRERLEVLDDESHVLSFRVVGGEHRLQNYLSVTTVHPSPAAPDAATVVVESYVVDVPPGNTPEDTRVFVDTIVKCNLQSLATTAEKLALAAV

SEQ ID NO: 36 - protein, 179 aa, Physcomitrella patens
MQTKGRQADFQTLLEGQQDLICRFHRHELQPHQCGSILLQLIKAPVETVWSVARSFDKPQVYKRFIQTCEIIEGDGGVGSIREVRLVSSIPATSSIERLEILDDEEHIISFRVLGGGHRLQNYWSVTSLHSHEIDGQMGTLVLESYVVDIPEGNTREETHMFVDTVVRCNLKALAQVSE

SEQ ID NO: 37 - protein, 229 aa, Oryza sativa
MPCIPASSPGIPHQHQHQHHRALAGVGMAVGCAAEAAVAAAGVAGTRCGAHDGEVPMEVARHHEHAEPGSGRCCSAVVQHVAAPAPAVWSVVRRFDQPQAYKRFVRSCALLAGDGGVGTLREVRVVSGLPAASSRERLEILDDESHVLSFRVVGGEHRLKNYLSVTTVHPSPSAPTAATVVVESYVVDVPPGNTPEDTRVFVDTIVKCNLQSLAKTAEKLAAGARAAGS

SEQ ID NO: 38 - protein, 229 aa, Oryza sativa
MPCIPASSPGIPHQHQHQHHRALAGVGMAVGCAAEAAVAAAGVAGTRCGAHDGEVPMEVARHHEHAEPGSGRCCSAVVQHVAAPAAAVWSVVRRFDQPQAYKRFVRSCALLAGDGGVGTLREVRVVSGLPAASSRERLEILDDESHVLSFRVVGGEHRLKNYLSVTTVHPSPSAPTAATVVVESYVVDVPPGNTPEDTRVFVDTIVKCNLQSLAKTAEKLAAGARAAGS

SEQ ID NO: 39 - protein, 205 aa, Medicago truncatula
MPSPVQFQRFDSNTAITNGVNCPKQIQACRYALSSLKPTVSVPETVVDHHMHVVGQNQCYSVVIQTINASVSTVWSVVRRFDYPQGYKHFVKSCNVVASGDGIRVGALREVRLVSGLPAVSSTERLDILDEERHVISFSVVGGVHRCRNYRSVTTLHGDGNGGTVVIESYVVDVPQGNTKEETCSFADTIVRCNLQSLVQIAEKL

SEQ ID NO: 40 - protein, 212 aa, Zea mays
MPFAASRTSQQQHSRVATNGRAVAVCAGHAGVPDEVARHHEHAVAAGQCCAAMVQSIAAPVDAVWSLVRRFDQPQRYKRFIRSCHLVDGDGAEVGSVRELLLVSGLPAESSRERLEIRDDERRVISFRVLGGDHRLANYRSVTTVHEAAPSQDGRPLTMVVESYVVDVPPGNTVEETRIFVDTIVRCNLQSLEGTVIRQLEIAAMPHDDNQN

SEQ ID NO: 41 - protein, 233 aa, Zea mays
MRERNSSIDQEHQRGSSSRSTMPFAASRTSQQQHSRVATNGRAVAVCAGHAGVPDEVARHHEHAVAAGQCCAAMVQSIAAPVDAVWSLVRRFDQPQRYKRFIRSCHLVDGDGAEVGSVRELLLVSGLPAESSRERLEIRDDERRVISFRVLGGDHRLANYRSVTTVHEAAPSQDGRPLTMVVESYVVDVPPGNTVEETRIFVDTIVRCNLQSLEGTVIRQLEIAAMPHDDNQN

SEQ ID NO: 42 - protein, 194 aa, Physcomitrella patens
MMQEKQGRPDFQFLLEGQQDLICRFHKHELLPHQCGSILLQQIKAPVQTVWLIVRRFDEPQVYKRFIQRCDIVEGDGVVGSIREVQLVSSIPATSSIERLEILDDEEHIISFRVLGGGHRLQNYWSVTSLHRHEIQGQMGTLVLESYVVDIPDGNTREETHTFVDTVVRCNLKALAQVSEQKHLLNSNEKPAAP

SEQ ID NO: 43 - protein, 191 aa, Vitis vinifera
MKVYSPSQILAERGPRAQAMGNLYHTHHLLPNQCSSLVVQTTDAPLPQVWSMVRRFDRPQSYKRFVRGCTLRRGKGGVGSVREVNIVSGLPAEISLERLDKLDDDLHVMRFTVIGGDHRLANYHSTLTLHEDEEDGVRKTVVMESYVVDVPGGNSAGETCYFANTIIGFNLKALAAVTETMALKANIPSGF

SEQ ID NO: 44 - protein, 217 aa, Physcomitrella patens
MQQVKGRQDFQRLLEAQQDLICRYHTHELKAHQCGSILLQQIKVPLPIVWAIVRSFDKPQVYKRFIQTCKITEGDGGVGSIREVHLVSSVPATCSIERLEILDDEKHIISFRVLGGGHRLQNYSSVSSLHELEVEGHPCTLVLESYMVDIPDGNTREETHMFVDTVVRCNLKSLAQISEQQYNKDCLQQKQHDQQQMYQQRHPPLPPIPITDKNMER

SEQ ID NO: 45 - protein, 195 aa, Physcomitrella patens
MRFDIGHNDVRGFFTCEEEHAYALHSQTVELNQCGSILMQQIHAPIEVVWSIVRSFGSPQIYKKFIQACILTVGDGGVGSIREVFLVSGVPATSSIERLEILDDEKHVFSFRVLKGGHRLQNYRSVTTLHEQEVNGRQTTTVLESYVVDVPDGNTREETHMFADTVVMCNLKSLAQVAEWRAMQGITQQLSTSSL

SEQ ID NO: 46 - protein, 172 aa, Vitis vinifera
MGNLYHTHHLLPNQCSSLVVQTTDAPLPQVWSMVRRFDRPQSYKRFVRGCTLRRGKGGVGSVREVNIVSGLPAEISLERLDKLDDDLHVMRFTVIGGDHRLANYHSTLTLHEDEEDGVRKTVVMESYVVDVPGGNSAGETCYFANTIIGFNLKALAAVTETMALKANIPSGF

SEQ ID NO: 47 - protein, 196 aa, Picea sitchensis
MEDLSSWREGRAMWLGNPPSESELVCRHHRHELQGNQCSSFLVKHIRAPVHLVWSIVRTFDQPQKYKPFVHSCSVRGGITVGSIRNVNVKSGLPATASEERLEILDDNEHVFSIKILGGDHRLQNYSSIITVHPEIIDGRPGTLVIESYVVDVPEGNTREETRFFVEALVKCNLKSLADVSERLASQHHTELLERT

SEQ ID NO: 48 - protein, 185 aa, Solanum tuberosum
MNANGFCGVEKEYIRKHHLHEPKENQCSSFLVKHIRAPVHLVWSLVRRFDQPQKYKPFISRCIVQGDLEIGSLREVDVKSGLPATTSTERLELLDDEEHILSVRIVGGDHRLRNYSSVISVHPEVIDGRPGTVVLESFVVDVPEGNTKDETCYFVEALINCNLKSLADISERVAVQDRTEPIDQV

SEQ ID NO: 49 - protein, 190 aa, Medicago truncatula
MNNGCEQQQYSVIETQYIRRHHKHDLRDNQCSSALVKHIKAPVHLVWSLVRRFDQPQKYKPFISRCIMQGDLSIGSVREVNVKSGLPATTSTERLEQLDDEEHILGIRIVGGDHRLRNYSSIITVHPGVIDGRPGTMVIESFVVDVPEGNTKDETCYFVEALIRYNLSSLADVSERMAVQGRTDPININP

SEQ ID NO: 50 - protein, 185 aa, Vitis vinifera
MSGYGCIKMEDEYIRRHHRHEIRDNQCSSSLVKHIKAPVHLVWSLVRSFDQPQKYKPFVSRCIVQGDLEIGSVREVNVKSGLPATTSTERLELLDDEEHIFGMRIVGGDHRLKNYSSIVTVHPEIIDGRPGTLVIESFVVDVPDGNTKDETCYFVEALIKCNLKSLADVSERLAIQDRTEPIDRM

SEQ ID NO: 51 - protein, 185 aa, Vitis vinifera
MNGNGLSSMESEYIRRHHRHEPAENQCSSALVKHIKAPVPLVWSLVRRFDQPQKYKPFISRCVVQGNLEIGSLREVDVKSGLPATTSTERLELLDDDEHILSMRIIGGDHRLRNYSSIISLHPEIIDGRPGTMVIESYVVDVPEGNTKDETCYFVEALIKCNLKSLADVSERLAVQDRTEPIDRM

SEQ ID NO: 52 - protein, 208 aa, Oryza sativa
MEAHVERALREGLTEEERAALEPAVMAHHTFPPSTTTATTAAATCTSLVTQRVAAPVRAVWPIVRSFGNPQRYKHFVRTCALAAGNGPSFGSVREVTVVSGPSRLPPGTERLEMLDDDRHIISFRVVGGQHRLRNYRSVTSVTEFQPPAAGPGPAPPYCVVVESYVVDVPDGNTAEDTRMFTDTVVKLNLQMLAAVAEDSSSASRRRD

SEQ ID NO: 53 - protein, 186 aa, Capsicum annuum
MMNANGFSGVEKEYIRKHHLHQPKENQCSSFLVKHIRAPVHLVWSLVRRFDQPQKYKPFVSRCIAQGDLEIGSLREVDVKSGLPATTSTERLELLDDEEHILSFRIIGGDHRLRNYSSIISLHPEVIDGRPGTLVIESFVVDVPQGNTKDETCYFVEALINCNLKSLADVSERLAVQDRTEPIDQV

SEQ ID NO: 54 - protein, 186 aa, Populus trichocarpa
MNGSDAYSATEAQYVRRHHKHEPRENQCTSALVKHIKAPAHLVWSLVRRFDQPQRYKPFVSRCVMNGELGIGSVREVNVKSGLPATTSTERLELLDDEEHILGVQIVGGDHRLKNYSSIMTVHPEFIDGRPGTLVIESFIVDVPDGNTKDETCYFVEALIRCNLKSLADVSERMAVQDRVEPVNQF

SEQ ID NO: 55 - protein, 185 aa, Capsicum annuum
MNANGFSGVEKEYIRKHHLHQPKENQCSSFLVKHIRAPVHLVWSLVRRFDQPQKYKPFVSRCIAQGDLEIGSLREVDVKSGLPATTSTERLELLDDEEHILSFRIIGGDHRLRNYSSIISLHPEVIDGRPGTLVIESFVVDVPQGNTKDETCYFVEALINCNLKSLADVSERLAVQDRTEPIDQV

SEQ ID NO: 56 - protein, 186 aa, Populus trichocarpa x Populus deltoides
MNGSDAYSATEAQYVRRHHKHEPRENQCTSALVKHIKAPAHLVWSLVRRFDQPQRYKPFVSRCVMNGELGIGSVREVNVKSGLPATTSTERLELLDDEEHILGVQIVGGDHRLKNYSSIMTVHPEFIDGRPGTLVIESFIVDVPDGNTKDETCYFVKALIRCNLKSLADVSERMAVQDRVEPVNQF

SEQ ID NO: 57 - protein, 188 aa, Pisum sativum
MNNGGEQYSAIETQYIRRRHKHDLRDNQCSSALVKHIKAPVHLVWSLVRRFDQPQKYKPFVSRCIMQGDLGIGSVREVNVKSGLPATTSTERLEQLDDEEHILGIRIVGGDHRLRNYSSVITVHPEVIDGRPGTMVIESFVVDVPEGNTRDETCYFVEALIRGNLSSLADVSERMAVQGRTDPINVNP

SEQ ID NO: 58 - protein, 177 aa, Vitis vinifera
MEAQVICRHHAHEPRENQCSSVLVRHVKAPANLVWSLVRRFDQPQKYKPFVSRCVVQGDLRIGSVREVNVKTGLPATTSTERLELFDDDEHVLGIKILDGDHRLRNYSSVITVHPEIIDGRPGTLVIESFVVDVPEGNTKDDTCYFVRALINCNLKCLAEVSERMAMLGRVEPANAV

SEQ ID NO: 59 - protein, 178 aa, Vitis vinifera
MMEAQVICRHHAHEPRENQCSSVLVRHVKAPANLVWSLVRRFDQPQKYKPFVSRCVVQGDLRIGSVREVNVKTGLPATTSTERLELFDDDEHVLGIKILDGDHRLRNYSSVITVHPEIIDGRPGTLVIESFVVDVPEGNTKDDTCYFVRALINCNLKCLAEVSERMAMLGRVEPANAV

SEQ ID NO: 60 - protein, 193 aa, Arachis hypogaea
  VARIANT (162)..(162): Xaa = any amino acid
MMNGSCGGGGGGEAYGAIEAQYIRRHHRHEPRDNQCTSALVKHIRAPVHLVWSLVRRFDQPQKYKPFVSRCIMQGDLGIGSVREVNVKSGLPATTSTERLEQLDDEEHILGIRIVGGDHRLRNYSSIITVHPEVIEGRPGTMVIESFVVDVPDGNTKDETCXFVEALIRCNLSSLADVSERMAVQGRTDPINQ

SEQ ID NO: 61 - protein, 217 aa, Zea mays
MVVEMDGGVGVAAGGGGGAQTPAPAPPRRWRLADERCDLRAMETDYVRRFHRHEPRDHQCSSAVAKHIKAPVHLVWSLVRRFDQPQLFKPFVSRCEMKGNIEIGSVREVNVKSGLPATRSTERLELLDDDERILSVRFVGGDHRLQNYSSILTVHPEVIDGRPGTLVIESFVVDVPDGNTKDETCYFVEALLKCNLRSLAEVSEGQVIMDQTEPLDR

SEQ ID NO: 62 - protein, 217 aa, Zea mays
MVVEMDGGVGVAAAGGGGAQTPAPPPPRRWRLADERCDLRAMETDYVRRFHRHEPRDHQCSSAVAKHIKAPVHLVWSLVRRFDQPQLFKPFVSRCEMKGNIEIGSVREVNVKSGLPATRSTERLELLDDDERILSVRFVGGDHRLQNYSSILTVHPEVIDGRPGTLVIESFVVDVPDGNTKDETCYFVEALLKCNLRSLAEVSEGQVIMDQTEPLDR

SEQ ID NO: 63 - protein, 206 aa, Oryza sativa
MNGVGGAGGAAAGKLPMVSHRRVQWRLADERCELREEEMEYIRRFHRHEPSSNQCTSFAAKHIKAPLHTVWSLVRRFDQPQLFKPFVRNCVMRENIIATGCIREVNVQSGLPATRSTERLELLDDNEHILKVNFIGGDHMLKNYSSILTVHSEVIDGQLGTLVVESFIVDVPEGNTKDDISYFIENVLRCNLRTLADVSEERLANP

SEQ ID NO: 64 - protein, 206 aa, Oryza sativa
MNGAGGAGGAAAGKLPMVSHRQVQWRLADERCELREEEMEYIRQFHRHEPSSNQCTSFVAKHIKAPLQTVWSLVRRFDQPQLFKPFVRKCVMRENIIATGCVREVNVQSGLPATRSTERLELLDDNEHILKVKFIGGDHMLKNYSSILTIHSEVIDGQLGTLVVESFVVDIPEGNTKDDICYFIENILRCNLMTLADVSEERLANP

SEQ ID NO: 65 - protein, 205 aa, Oryza sativa
MVEVGGGAAEAAAGRRWRLADERCDLRAAETEYVRRFHRHEPRDHQCSSAVAKHIKAPVHLVWSLVRRFDQPQLFKPFVSRCEMKGNIEIGSVREVNVKSGLPATRSTERLELLDDNEHILSVRFVGGDHRLKNYSSILTVHPEVIDGRPGTLVIESFVVDVPEGNTKDETCYFVEALLKCNLKSLAEVSERLVCQGPNRAPSTR

SEQ ID NO: 66 - protein, 204 aa, Oryza sativa
MVEVGGGAAEAAAGRRWRLADERCDLRAAETEYVRRFHRHEPRDHQCSSAVAKHIKAPVHLVWSLVRRFDQPQLFKPFVSRCEMKGNIEIGSVREVNVKSGLPATRSTERLELLDDNEHILSVRFVGGDHRLKNYSSILTVHPEVIDGRPGTLVIESFVVDVPEGNTKDETCYFVEALLKCNLKSLAEVSERLVVKDQTEPLDR

SEQ ID NO: 67 - protein, 199 aa, Medicago truncatula
MEKMNGTENNGVFNSTEMEYIRRHHNQQPGENQCSSALVKHIRAPVPLVWSLVRRFDQPQKYKPFVSRCVVRGNLEIGSLREVDVKSGLPATTSTERLEVLDDNEHILSIRIIGGDHRLRNYSSIMSLHPEIIDGRPGTLVIESFVVDVPEGNTKDETCYFVEALIKCNLKSLSDVSEGHAVQDLTEPLDRVHELLISG

SEQ ID NO: 68 - protein, 199 aa, Medicago truncatula
MEKMNGTENNGVFNSTEMEYIRRHHNQQPGENQCSSALVKHIRAPVPLVWSLVRRFDQPQKYKPFVSRCVVRGNLEIGSLREVDVKSGLPATTSTERLEVLDDNEHILSIRIIGGDHRLRNYSSIMSLHPEIIDGRPGTLVIESFVVDVPEGNTKDETCYFVEALIKCNLKSLSDVSEGHAAQDLTEPLDRMHELLISG

SEQ ID NO: 69 - protein, 197 aa, Zea mays
MVGLVGGSTARAEHVVANAGGEAEYVRRMHRHAPTEHQCTSTLVKHIKAPVHLVWQLVRRFDQPQRYKPFVRNCVVRGDQLEVGSLRDVNVKTGLPATTSTERLEQLDDDLHILGVKFVGGDHRLQNYSSIITVHPESIDGRPGTLVIESFVVDVPDGNTKDETCYFVEAVIKCNLNSLAEVSEQLAVESPTSLIDQ

SEQ ID NO: 70 - protein, 197 aa, Zea mays
MVGLVGGSTARAEHVVANAGGEAEYVRRMHRHAPTEHQCTSTLVKHIKAPVHLVWELVRRFDQPQRYKPFVRNCVVRGDQLEVGSLRDVNVKTGLPATTSTERLEQLDDDLHILGVKFVGGDHRLQNYSSIITVHPESIDGRPGTLVIESFVVDVPDGNTKDETCYFVEAVIKCNLNSLAEVSEQLAVESPTSLIDQ

SEQ ID NO: 71 - protein, 212 aa, Zea mays
MVMVEMDGGVGGGGGGGQTPAPRRWRLADERCDLRAMETDYVRRFHRHEPREHQCSSAVAKHIKAPVHLVWSLVRRFDQPQLFKPFVSRCEMKGNIEIGSVREVNVKSGLPATRSTERLELLDDNEHILSVRFVGGDHRLQNYSSILTVHPEVIDGRPGTLVIESFVVDVPDGNTKDETCYFVEALLKCNLKSLAEVSERQVVKDQTEPLDR

SEQ ID NO: 72 - protein, 205 aa, Oryza sativa
MNGAGGAGGAAAGKLPMVSHRRVQCRLADKRCELREEEMEYIRQFHRHEPSSNQCTSFVAKHIKAPLQTVWSLVRRFDQPQLFKPFVRKCVMRENIIVTGCVREVNVQSGLPATRSTERLELLDDNEHILKVKFIGGDHMLKNYSSILTIHSEVIDGQLGTLVVESFVVDIPDGNTKDDICYFIENVLRCNLMTLADVSEERLAN

SEQ ID NO: 73 - protein, 197 aa, Zea mays
MVGLVGGSTARAEHVVANAGGETEYVRRLHRHAPAEHQCTSTLVKHIKAPVHLVWELVRSFDQPQRYKPFVRNCVVRGDQLEVGSLRDVNVKTGLPATTSTERLEQLDDDLHILGVKFVGGDHRLQNYSSIITVHPESIDGRPGTLVIESFVVDVPDGNTKDETCYFVEAVIKCNLKSLAEVSEQLAVESPTSPIDQ

SEQ ID NO: 74 - protein, 206 aa, Oryza sativa
MNGVGGAGGAAAGKLPMVSHRRVQWRLADERCELREEEMEYIRRFHRHEPSSNQCTSFAAKHIKAPLHTVWSLVRRFDQPQLFKPFVRNCVMRENIIATGCIREVNVQSGLPATRSTERLELLDDNEHILKVKFIGGDHMLKNYSSILTVHSEVIDGQLGTLVVESFIVDVLEGNTKDDISYFIENVLRCNLRTLADVSEERLANP

SEQ ID NO: 75 - protein, 209 aa, Oryza sativa
MVGLVGGGGWRVGDDAAGGGGGGAVAAGAAAAAEAEHMRRLHSHAPGEHQCSSALVKHIKAPVHLVWSLVRSFDQPQRYKPFVSRCVVRGGDLEIGSVREVNVKTGLPATTSTERLELLDDDEHILSVKFVGGDHRLRNYSSIVTVHPESIDGRPGTLVIESFVVDVPDGNTKDETCYFVEAVIKCNLTSLAEVSERLAVQSPTSPLEQ

SEQ ID NO: 76 - protein, 180 aa, Oryza sativa
MVEMDAGGRPEPSPPSGQCSSAVTMRINAPVHLVWSIVRRFEEPHIFQPFVRGCTMRGSTSLAVGCVREVDFKSGFPAKSSVERLEILDDKEHVFGVRIIGGDHRLKNYSSVLTAKPEVIDGEPATLVSESFVVDVPEGNTADETRHFVEFLIRCNLRSLAMVSQRLLLAQGDLAEPPAQ

SEQ ID NO: 77 - protein, 176 aa, Vitis vinifera
MNGNGLSSMESEYIRRHHRHEPAENQCSSALVKHIKAPVPLVWSLVRRFDQPQKYKPFISRCVVQGNLEIGSLREVDVKSGLPATTSTERLELLDDDEHILSMRIIGGDHRLRNYSSIISLHPEIIDGRPGTMVIESYVVDVPEGNTKDETCYFSLADVSERLAVAGTVTEPIDRM

SEQ ID NO: 78 - protein, 180 aa, Oryza sativa
MVEMDAGGRPEPSPPSGQCSSAVTMRINAPVHLVWSIVRRFEEPHIFQPFVRGCTMRGSTSLAVGCVREVDFKSGFSAKSSVERLEILDDKEHVFGVRIIGGDHRLKNYSSVLTAKPEVIDGEPATLVSESFVIDVPEGNTADETRHFVEFLIRCNLRSLAMVSQRLLLAQGDLAEPPAQ

SEQ ID NO: 79 - protein, 215 aa, Oryza sativa
MPCIPASSPGIPHQHQHQHHRALAGVGMAVGCAAEAAVAAAGVAGTRCGAHDGEVPMEVARHHEHAEPGSGRCCSAVVQHVAAPAAAVWSVVRRFDQPQAYKRFVRSCALLAGDGGLGKVRERLEILDDESHVLSFRVVGGEHRLKNYLSVTTVHPSPSAPTAATVVVESYVVDVPPGNTPEDTRVFVDTIVKCNLQSLAKTAEKLAAGARAAGS

SEQ ID NO: 80 - protein, 186 aa, Rheum australe
MNGDGYGGSEEEFVKRYHEHVLADHQCSSVLVEHINAPLHLVWSLVRSFDQPQKYKPFVSRCVVQGGDLEIGSVREVDVKSGLPATTSMEELELLDDKEHVLRVKFVGGDHRLKNYSSIVSLHPEIIGGRSGTMVIESFIVDIADGNTKEETCYFIESLINCNLKSLSCVSERLAVEDIAERIAQM

SEQ ID NO: 81 - protein, 254 aa, Oryza sativa
MVGLVGGGGWRVGDDAAGGGGGGAVAAGAAAAAEAEHMRRLHSQGPRRAPVQLRARQAHQGSCSPPRIECANFAVFLAARDPKIVWSLVRSFDQPQRYKPFVSRCVVRGGDLEIGSVREVNVKTGLPATTSTERLELLDDDEHILSVKFVGGDHRLRNYSSIVTVHPESIDGRPGTLVIESFVVDVPDGNTKDETCYFVEAVIKCNLTSLAEMVRMISLVLPFMLVDRMSGITCESHLETTLVRCGEYAVLAHV

SEQ ID NO: 82 - protein, 186 aa, Oryza sativa
MEPHMERALREAVASEAERRELEGVVRAHHTGWNAPLAAVWPHRARVRPTRSGTSTSSSRASSPPGDGATVGSVREVAVVSGLPASTSTERLEILDDDRHVLSFRVVGGDHRLRNYRSVTSVTEFSSPSSPPRPYCVVVESYVVDVPEGNTEEDTRMFTDTVVKLNLQKLAAVATSSSPPAAGNHH

SEQ ID NO: 83 - protein, 150 aa, Oryza sativa
MEVVWSIVRRFEEPHIFQPFVRGCTMRGSTSLAVGCVREVDFKSGFPAKSSVERLEILDDKEHVFGVRIIGGDHRLKNYSSVLTAKPEVIDGEPATLVSESFVVDVPEGNTADETRHFVEFLIRCNLRSLAMVSQRLLLAQGDLAEPPGQ

SEQ ID NO: 84 - protein, 206 aa, Oryza sativa
MPYTAPRPSPPQHSRIGGCGGGGVLKAAGAAGHAASCVAVPAEVARHHEHAAGVGQCCSAVVQAIAAPVDAVWRTSTSSGAAASWTATATAGPLPVGSVREFRVLSGLPGTSSRERLEILDDERRVLSFRVVGGEHRLSNYRSVTTVHETAAGAAAAVVVESYVVDVPHGNTADETRMFVDTIVRCNLQSLARTAEQLALAAPRAA

SEQ ID NO: 85 - protein, 396 aa, Vitis vinifera
  VARIANT (1)..(396): Xaa = any amino acid
MPISSLPFSLYTVTPNPLKLITTHAHAFTPHTHIFTLKFMSHTYCPHIHHITSIHYTHLLXPIPHMPLQPPLPPHPILPSMPAFQHLYSTNQHLQVALFSARGPNIRDFNFQDADLLKLDILAPGSLIWAAWSPNGTDEANYVGEGSPTVAMIAKRGPRHGKYMAFCXMYRDNVAPKGVNXAVATVKTKRTIQLKTSLEIACHYAGINISGINGEVMPGQWEYQVGPGQCSSLLAQRVHVPLSAVGSVVHRFDKPQRYQHVIKSCRIEDGFEMRMGXLRDVNIISGLPTATNTGRLDMQDDERHVTRCPHQRQSESKYTENNNSDASSIKSPINGPSEHLKTAASPKTESIIVIDTSKFLNEEDFEGKDETSSSNQVQIEDENWETRFPNTDAGIW

SEQ ID NO: 86 - protein, 443 aa, Vitis vinifera
  VARIANT (1)..(443): Xaa = any amino acid
MPSAXKSSTVPLSLXQFKLGLRHGHRVIPWGDLDSLAMLQRQLDVDILVTGHTHRFTAYKHEGGVVINPGSATGAFGSITYDVNPSFVLMDIDGLRVVVCVYELIDETANIIKELHARKISFGTKSMIXCLLLKRRSTPKFRRKKLFLFQCRVQMTLTLTNLAVSGIAQTLQVDQWTVCALIFMTRRDIHLDKARFLDFKDMGKLLADASGLRKALSGGXVTAGMAIFDTMRHIRPDVPTVCVGLAAVAMIAKRGPRHGKYMAFCPMYRDNVAPKGVNVAVVTVKTKRTIQLKTSLEIACHYAGINISGINGEVMPGQWEYQVGPGQCSSLLAQRVHVPLSAVGSVVHRFDKPQRYQHVIKSCRIEDGFEMRMGRLRDVNIISGLPTATNTGRLDMQDDEXHVTRCPHQRQSESKYTENNNSDASSVKSPINGPSEHLKTAAX

SEQ ID NO: 87 - protein, 95 aa, Oryza sativa
EIGSVREVNVKTGLPATTSTERLELLDDDEHILSVKFVGGDHRLRNYSSIVTVHPESIDGRPGTLVIESFVVDVPDGNTKDETCYFVEAVIKCNL

SEQ ID NO: 88 - protein, 191 aa, Zea mays
MVVEMDGGVGVAAAGGGGAQTPAPPPPRRWRLADERCDLRAMETDYVRRFHRHEPRDHQCSSAVAKHIKAPVHLVWSLVRRFDQPQLFKPFVSRCEMKGNIEIGSVREVNVKSGLPATRSTERLELLDDDERILSVRFVGGDHRLQVCSVLHLSIFCAAHARYFAHHLKCVLEFLCQMHLDVLPCDDAILE

SEQ ID NO: 89 - protein, 239 aa, Oryza sativa
MNGCTGGAGGVAAGRLPAVSLQQAQWKLVDERCELREEEMEYVRRFHRHEIGSNQCNSFIAKHVRAPLQNVWSLVRRFDQPQIYKPFVRKCVMRGNVETGSVREIIVQSGLPATRSIERLEFLDDNEYILRVKFIGGDHMLKKRIPKKTYAISSRTCSDSAIIAVGQSNCAPEITAMNGGVSIQPWLILLAFFSSPSNQTNPDSLRDMHPGSWFQILLVLAMFTCSKGSVLPPSEKVNV

SEQ ID NO: 90 - protein, 188 aa, Zea mays
MEPHMESALRQGLSEAEQRELEGVVRAHHTFPGRAPGTCTSLVTQRVDAPLAAVWPIVRGFGSPQRYKHFIKSCDLKAGDGATVGSVREVTVVSGLPASTSTERLEILDDHRHILSFRVVGGDHRLRNYRSVTSVTEFQPGPYCVVLESYVVDVPDGNTEEDTRMFTDTVVKLNLQKLAAIATSSSAN

SEQ ID NO: 91 - protein, 205 aa, Zea mays
MDQQGAGGDVEVPAGLGLTAAEYEQLRPTVDAHHRYAVGEGQCSSLLAQRIHAPPAAVWAIVRRFDCPQVYKHFIRSCAVRPDPDAGDALRPGRLREVCVISGLPASTSTERLDHLDDAARVFGFSITGGEHRLRNYRSVTTVSELAGPGICTVVLESYAVDVPDGNTEDDTRLFADTVIRLNLQKLKSVAEASTSSSAPPPPSE

SEQ ID NO: 92 - protein, 220 aa, Zea mays
MPCIQASSPGGMPHQHGRGRVLGGGVGCAAEVAAAVAASAGGMRCGAHDGEVPAEAARHHEHAAAGPGRCCSAVVQHVAAPAAAVWSVVRRFDQPQVYKRFVRSCALLAGDGGVGTLREVRVVSGLPAASSRERLEVLDDESHVLSFRVVGGEHRLRNYLSVTTVHPSPAAPDAATVVVESYVVDVPPGNTPEDTRVFVDTIVKCNLQSLATTAEKLAAV

SEQ ID NO: 93 - protein, 221 aa, Glycine max
MEKAESSASTSEPDSDENHHRHPTNHHINPPSGLTPLEFASLIPSVAEHHSYLVGSGQCSSLLAQRVQAPPDAVWSVVRRFDKPQTYKHFIKSCAVKEPFHMAVGVTRDVNVISGLPAATSTERLDLLDDIRCVTGFSIIGGEHRLRNYRSVTTVHSFEDDADDGKIYTVVLESYVVDVPDGNTEEDTRLFADTVVKLNLQKLASVTEGTNRDGDGKSHSR

SEQ ID NO: 94 - protein, 214 aa, Glycine max
MEKTHSSSAEEQDPTRRHLDPPPGLTAEEFEDLKPSVLEHHTYSVTPTRQSSSLLAQRIHAPPHAVWSVVRCFDNPQAYKHFIKSCHVKEGFQLAVGSTRDVHVISGLPAATSTERLDLLDDDRHVIGFTIVGGDHRLRNYRSVTSVHGFECDGKIWTVVLESYVVDVPEGNTEEDTRLFADTVVKLNLQKLASVSEGMCGDGDGDGDGKGNKS

SEQ ID NO: 95 - protein, 216 aa, Glycine max
MLQNSSMSSLLLHRINGGGGATTATNCHDTVFMTVPDGVARYHTHAVAPNQCCSSVAQEIGASVATVWSVLRRFDNPQAYKHFVKSCHVIGGDGDVGTLREVHVISGLPAARSTERLEILDDERHVISFSVVGGDHRLANYRSVTTLHPTASSASGGCSGTVVVESYVVDVPPGNTREDTRVFVDTIVKCNLQSLAQTAENLTLRKNNNNDYKCCS

SEQ ID NO: 96 - protein, 208 aa, Glycine max
MTSLQFHRFNPATDTSTAIANGVNCPKPPSTLRLLAKVSLSVPETVARHHAHPVGPNQCCSVVIQAIDAPVSAVWPVVRRFDNPQAYKHFVKSCHVVAAAGGGEDGIRVGALREVRVVSGLPAVSSTERLEILDDERHVMSFSVVGGDHRLRNYRSVTTLHGDGNGGTVVIESYVVDVPPGNTKEETCVFVDTIVRCNLQSLAQIAET

SEQ ID NO: 97 - protein, 176 aa, Glycine max
AYPVLGLTPEEFSELESIINTHHKFEPSPEICSSIIAQRIDAPAHTVWPLVRSFENPQKYKHFVKSCNMRSGDGGVGSIREVTVVSGLPASTSTERLEILDDDKHLLSFRVVGGEHRLHNYRSVTSVNEFKNPDNGKVYTIVLESYVVDIPEGNTGVDTKMFVDTVVKLNLQKLGE

SEQ ID NO: 98 - protein, 172 aa, Glycine max
EFTELESTINTHHKFEASPEICSSIIAQRIDAPAHTVWPLVRSFENPQKYKHFVKSCNMRSGDGGVGSIREVTVVSGLPASTSTERLEILDDDNHLLSFRVVGGEHRLHNYRSVTSVNEFKRPDNGKVYTIVLESYVVDIPEGNTGVDTKMFVDTVVKLNLQKLGEVAMATN

SEQ ID NO: 99 - protein, 191 aa, Glycine max
MTELSSREVEYIRRHHSKAAEDNQCASALVKHIRAPLPLVWSLVRRFDEPQKYKPFVSRCVVRGNLEIGSLREVDVKSGLPATTSTERLEILDDNHHILSVRIIGGDHRLRNYSSIMSLHPEIVDGRPGTLVIESFVVDIPEGNTKDETCYFVEALIKCNLKSLADVSEGLTLQDHTEPIDRKYELLITRG

SEQ ID NO: 100 - protein, 185 aa, Glycine max
MNGGESYGAIETQYIRRHHKHEPRENQCTSALVKHIRAPVHLVWSLVRRFDQPQKYKPFVSRCIMQGDLGIGSVREVNVKSGLPATTSTERLEQLDDEEHILGIRIVGGDHRLRNYSSIITVHPEVIDGRPGTMVIESFVVDVPDGNTRDETCYFVEALIRCNLSSLADVSERMAVQGRTNPINH

SEQ ID NO: 101 - protein, 178 aa, Glycine max
MSPNNPSTIVSDAVARHHTHVVSPHQCCSAVVQEIAAPVSTVWSVVRRFDNPQAYKHFVKSCHVILGDGDVGTLREVRVISGLPAAVSTERLDVLDDERHVIGFSMVGGDHRLSNYRSVTILHPRSATDTVVVESYVVDVPAGNTTEDTRVFVDTILRCNLQSLAKFAENLTNKLHQR

SEQ ID NO: 102 - protein, 246 aa, Glycine max
MSRSHNKRKPFSFIFKITLLELLSSLLSSSLRFAMDKTHSGEEQDPNPTHPTRNHLDPPPGLTPEEFEDLKPSVLEHHTYSVTPTRQCSSLLAQRIHAPPHTVWTVVRCFDNPQAYKHFIKSCHVKEGFQLAVGSTRDVHVISGLPAATSTERLDLLDDDRHVIGFTIVGGDHRLRNYRSVTSVHGFERDGKIWTVVLESYVVDVPEGNTEEDTRLFADTVVKLNLQKLASVTEGMCGDSDGKGNN

SEQ ID NO: 103 - protein, 223 aa, Glycine max
MEKAESSASTSEPDSDDNHHRHPTNHHLNPPSGLTPLEFASLVPSVAEHHSYLVGPGQCSSLLAQRVHAPPDAVWSFVRRFDKPQTYKHFIKSCAVKEPFHMAVGVTRDVNVISGLPAATSTERLDFLDDVRRVTGFSIIGGEHRLRNYRSVTTVHSFDDDNASADGKIYTVVLESYVVDVPDGNTEEDTRLFADTVVKLNLQKLASVTEGTNGDGDGKPHSR

SEQ ID NO: 104 - protein, 229 aa, Glycine max
MPSSLHFDRFNPITHAATTVAIANGVNCPKQPQAPPSSTAARRLVVPSLSSGRGIAAPDTVALHHAHVVDPNQCCSIVTQHINAPVSAVWAVVRRFDNPQGYKNFVRSCHVITGDGIRVGAVREVRVVSGLPAETSTERLEILDDERHVISFSMVGGDHRLRNYQSVTTLHANGNGTLVIESYVVDVPQGNTKEETCVFVDTIVRCNLQSLAQIAENRTNNCEHTAQHC

SEQ ID NO: 105 - protein, 191 aa, Glycine max
MNGIGNDGGGGLSNVEMEYIRRHHRHEPGENQCGSALVKHIRAPVPQVWSLVRRFDQPQKYKPFVSRCVVRGNLEIGSLREVDVKSGLPATTSTERLELLDDNEHLLSIRIIGGDHRLRNYSSIMSLHPEIIDGRPGTLVIESFVVDVPEGNTKDETCYFVEALIKCNLKSLADVSEGIAVQDRTEPIDRI

SEQ ID NO: 106 - protein, 169 aa, Glycine max
MVARHHAHAVGPNQCCSFVIQAIDAPVSAVWPVVRRFDNPQAYKHFVKSCHVVAAGGAGGDGGIHVGALREVRVVSGLPAVSSTERLEILDDERHVMSFSVVGGDHRLRNYRSVTTLHGDGSNGGTVVIESYVVDIPAGNTKEETCVFVDTIVRCNLQSLAQMAENMGS

SEQ ID NO: 107 - protein, 210 aa, Glycine max
MTILPHSNNKSSNHKFIAHQNYMASETHHHVQGLTPEELTKLEPIIKKYHLFEQSPNTCFSIITYRIEAPAKAVWPFVRSFDNPQKYKHFIKGCNMRGDGGVGSIREVTVVSGLPASTSTERLEILDDDKHVLSFRVVGGEHRLKNYRSVTSVNEFNKEGKVYTIVLESYIVDIPEGNTEEDTKMFVDTVVKLNLQKLGVVAMASSMHGQ

SEQ ID NO: 108 - protein, 193 aa, Glycine max
MNRIGNGGGGGGGLSNVEMEYIRRHHRHEPGENQCGSALVKHIRAPVPQVWSLVRRFDQPQKYKPFISRCVVRGNLEIGSLREVDVKSGLPATTSTERLELLDDNEHILSIRIIGGDHRLRNYSSIMSLHPEIIDGRPGTLVIESFVVDVPEGNTKDETCYFVEALIKCNLKSLADVSEGLAVQDCTEPIDRI

SEQ ID NO: 109 - protein, 188 aa, Glycine max
MASETHHHVQGLTPEELTQLEPIIKKYHLFEASSNKCFSIITHRIEAPASSVWPLVRNFDNPQKYKHFIKGCNMKGDGSVGSIREVTVVSGLPASTSTERLEILDDDKHVLSFRVVGGEHRLQNYRSVTSVNEFHKEGKVYTIVLESYIVDIPEGNTEEDTKMFVDTVVKLNLQKLGVVAMASSMNGR

SEQ ID NO: 110 - protein, 177 aa, Glycine max
MLPNNPSTIVPDAVARHHTHVVSPQQCCSAVVQEIAAPVSTVWSVVRRFDNPQAYKHFVKSCHVILGDGDVGTLREVHVISGLPAAVSTERLDVLDDERHVIGFSMVGGDHRLFNYRSVTTLHPRSAAGTVVVESYVVDVPPGNTTEDTRVFVDTILRCNLQSLAKFAENLTKLHQR

SEQ ID NO: 111 - protein, 185 aa, Glycine max; identical to SEQ ID NO: 100

SEQ ID NO: 112 - protein, 191 aa, Glycine max
MGITIGIQCLEIEEISICDGMFCYLVDFVDVKEKMNYCLMWFGYFPSQVWSLVRRFDQPQKYKPFVSRCIMQGDLGIGSVREVNVKSGLPATTSTERLEQLDDEEHILGIRIVGGDHRLRNYSSIITVHPEVIDGRPSTMVIESFVVDVPDGNTRDETCYFVEALIRCNLSSLADVSERMAVQGRTDPINH

SEQ ID NO: 113 - protein, 185 aa, Artificial Sequence
  synthetic PYR/PYL receptor protein
MNGGESYGAIETQYIRRHHKHEPRENQCTSALVKHIRAPVHLVWSLVRRFDQPQKYKPFVSRCIMQGDLGIGSVREVNVKSGLPATTSTERLEQLDDEEHILGIRIVGGDHRLRNYSSIITVHPEVIDGRPSTMVIESFVVDVPDGNTRDETCYFVEALIRCNLSSLADVSERMAVQGRTDPINH

SEQ ID NO: 114 - protein, 204 aa, Sorghum bicolor
METHVERALRATLTEAEVRALEPAVREHHTFPAGRVAAGTTTPTPTTCTSLVAQRVSAPVRAVWPIVRSFGNPQRYKHFVRTCALAAGDGASVGSVREVTVVSGLPASSSTERLEVLDDDRHILSFRVVGGDHRLRNYRSVTSVTEFQPGPYCVVVESYAVDVPEGNTAEDTRMFTDTVVRLNLQKLAAVAEESAAAAAAGNRR

SEQ ID NO: 115 - protein, 204 aa, Sorghum bicolor
MEPHMETALRQGGLSELEQRELEPVVRAHHTFPGRSPGTTCTSLVTQRVDAPLSAVWPIVRGFAAPQRYKHFIKSCDLRSGDGATVGSVREVTVVSGLPASTSTERLEILDDDRHILSFRVVGGDHRLRNYRSVTSVTEFHHHHQAAAGRPYCVVVESYVVDVPEGNTEEDTRMFTDTVVKLNLQKLAAIATSSAAAAASNSST

SEQ ID NO: 116 - protein, 258 aa, Sorghum bicolor
MVESPNPNSPSRPLCIKYTRAPARHFSPPLPFSSLIISANPIEPKAMDKQGAGGDVEVPAGLGLTAAEYEQLRSTVDAHHRYAVGEGQCSSLLAQRIQAPPAAVWAIVRRFDCPQVYKHFIRSCALRPDPEAGDALRPGRLREVSVISGLPASTSTERLDLLDDAARVFGFSITGGEHRLRNYRSVTTVSELADPGICTVVLESYVVDVPDGNTEDDTRLFADTVIRLNLQKLKSVAEANAAAAASFVSVVPPPEPEE

SEQ ID NO: 117 - protein, 222 aa, Sorghum bicolor
MPCLQASSSPGSMPHQHHGRVLAGVGCAAEVAAAAVAATSPAAGMRCGAHDGEVPAEAARHHEHAAPGPGRCCSAVVQHVAAPASAVWSVVRRFDQPQAYKRFVRSCALLAGDGGVGTLREVRVVSGLPAASSRERLEVLDDESHVLSFRVVGGEHRLQNYLSVTTVHPSPAAPDAATVVVESYVVDVPPGNTPEDTRVFVDTIVKCNLQSLATTAEKLAAV

SEQ ID NO: 118 - protein, 211 aa, Sorghum bicolor
MVEMDGGVGVVGGGQQTPAPRRWRLADELRCDLRAMETDYVRRFHRHEPRDHQCSSAVAKHIKAPVHLVWSLVRRFDQPQLFKPFVSRCEMKGNIEIGSVREVNVKSGLPATRSTERLELLDDNEHILSVKFVGGDHRLQNYSSILTVHPEVIDGRPGTLVIESFVVDVPDGNTKDETCYFVEALLKCNLKSLAEVSERQVIKDQTEPLDR

SEQ ID NO: 119 - protein, 216 aa, Sorghum bicolor
MPYTAPRPSPQQHSRVTGGGAKAAIVAASHGASCAAVPAEVARHHEHAARAGQCCSAVVQAIAAPVGAVWSVVRRFDRPQAYKHFIRSCRLVDDGGGGAGAGAGATVAVGSVREVRVVSGLPATSSRERLEILDDERRVLSFRVVGGEHRLANYRSVTTVHEAEAGAGGTVVVESYVVDVPPGNTADETRVFVDTIVRCNLQSLARTAERLALALA

SEQ ID NO: 120 - protein, 36 aa, Artificial Sequence
  synthetic hypersensitive PYR/PYL receptor consensus sequence
  VARIANT (1)..(36): Xaa = any amino acid
CXSXXXXXXXAPXXXXWXXXXXFXXPXXXXXFXXXC

SEQ ID NO: 121 - protein, 25 aa, Artificial Sequence
  synthetic hypersensitive PYR/PYL receptor consensus sequence
  VARIANT (1)..(25): Xaa = any amino acid
GXXRXVXXXSXXPAXXSXEXLXXXD

SEQ ID NO: 122 - protein, 11 aa, Artificial Sequence
  synthetic hypersensitive PYR/PYL receptor consensus sequence
  VARIANT (1)..(11): Xaa = any amino acid
GGXHRLXNYXS

SEQ ID NO: 123 - protein, 31 aa, Artificial Sequence
  synthetic hypersensitive PYR/PYL receptor consensus sequence
  VARIANT (1)..(31): Xaa = any amino acid
ESXXVDXPXGXXXXXTXXFXXXXXXXNLXXL

SEQ ID NO: 124 - protein, 191 aa, Artificial Sequence
  synthetic Arabidopsis PYR1 mutant F61L
MPSELTPEERSELKNSIAEFHTYQLDPGSCSSLHAQRIHAPPELVWSIVRRFDKPQTYKHLIKSCSVEQNFEMRVGCTRDVIVISGLPANTSTERLDILDDERRVTGFSIIGGEHRLTNYKSVTTVHRFEKENRIWTVVLESYVVDMPEGNSEDDTRMFADTVVKLNLQKLATVAEAMARNSGDGSGSQVT

SEQ ID NO: 125 - protein, 191 aa, Artificial Sequence
  synthetic Arabidopsis PYR1 mutant F61M
MPSELTPEERSELKNSIAEFHTYQLDPGSCSSLHAQRIHAPPELVWSIVRRFDKPQTYKHMIKSCSVEQNFEMRVGCTRDVIVISGLPANTSTERLDILDDERRVTGFSIIGGEHRLTNYKSVTTVHRFEKENRIWTVVLESYVVDMPEGNSEDDTRMFADTVVKLNLQKLATVAEAMARNSGDGSGSQVT

SEQ ID NO: 126 - protein, 191 aa, Artificial Sequence
  synthetic Arabidopsis PYR1 mutant V81I
MPSELTPEERSELKNSIAEFHTYQLDPGSCSSLHAQRIHAPPELVWSIVRRFDKPQTYKHFIKSCSVEQNFEMRVGCTRDIIVISGLPANTSTERLDILDDERRVTGFSIIGGEHRLTNYKSVTTVHRFEKENRIWTVVLESYVVDMPEGNSEDDTRMFADTVVKLNLQKLATVAEAMARNSGDGSGSQVT

SEQ ID NO: 127 - protein, 191 aa, Artificial Sequence
  synthetic Arabidopsis PYR1 mutant V81Y
MPSELTPEERSELKNSIAEFHTYQLDPGSCSSLHAQRIHAPPELVWSIVRRFDKPQTYKHFIKSCSVEQNFEMRVGCTRDYIVISGLPANTSTERLDILDDERRVTGFSIIGGEHRLTNYKSVTTVHRFEKENRIWTVVLESYVVDMPEGNSEDDTRMFADTVVKLNLQKLATVAEAMARNSGDGSGSQVT

SEQ ID NO: 128 - protein, 191 aa, Artificial Sequence
  synthetic Arabidopsis PYR1 mutant I110C
MPSELTPEERSELKNSIAEFHTYQLDPGSCSSLHAQRIHAPPELVWSIVRRFDKPQTYKHFIKSCSVEQNFEMRVGCTRDVIVISGLPANTSTERLDILDDERRVTGFSCIGGEHRLTNYKSVTTVHRFEKENRIWTVVLESYVVDMPEGNSEDDTRMFADTVVKLNLQKLATVAEAMARNSGDGSGSQVT

SEQ ID NO: 129 - protein, 191 aa, Artificial Sequence
  synthetic Arabidopsis PYR1 mutant I110S
MPSELTPEERSELKNSIAEFHTYQLDPGSCSSLHAQRIHAPPELVWSIVRRFDKPQTYKHFIKSCSVEQNFEMRVGCTRDVIVISGLPANTSTERLDILDDERRVTGFSSIGGEHRLTNYKSVTTVHRFEKENRIWTVVLESYVVDMPEGNSEDDTRMFADTVVKLNLQKLATVAEAMARNSGDGSGSQVT

SEQ ID NO: 130 - protein, 191 aa, Artificial Sequence
  synthetic Arabidopsis PYR1 mutant E141C
MPSELTPEERSELKNSIAEFHTYQLDPGSCSSLHAQRIHAPPELVWSIVRRFDKPQTYKHFIKSCSVEQNFEMRVGCTRDVIVISGLPANTSTERLDILDDERRVTGFSIIGGEHRLTNYKSVTTVHRFEKENRIWTVVLCSYVVDMPEGNSEDDTRMFADTVVKLNLQKLATVAEAMARNSGDGSGSQVT

SEQ ID NO: 131 - protein, 191 aa, Artificial Sequence
  synthetic Arabidopsis PYR1 mutant E141I
MPSELTPEERSELKNSIAEFHTYQLDPGSCSSLHAQRIHAPPELVWSIVRRFDKPQTYKHFIKSCSVEQNFEMRVGCTRDVIVISGLPANTSTERLDILDDERRVTGFSIIGGEHRLTNYKSVTTVHRFEKENRIWTVVLISYVVDMPEGNSEDDTRMFADTVVKLNLQKLATVAEAMARNSGDGSGSQVT

SEQ ID NO: 132 - protein, 191 aa, Artificial Sequence
  synthetic Arabidopsis PYR1 mutant E141L
MPSELTPEERSELKNSIAEFHTYQLDPGSCSSLHAQRIHAPPELVWSIVRRFDKPQTYKHFIKSCSVEQNFEMRVGCTRDVIVISGLPANTSTERLDILDDERRVTGFSIIGGEHRLTNYKSVTTVHRFEKENRIWTVVLLSYVVDMPEGNSEDDTRMFADTVVKLNLQKLATVAEAMARNSGDGSGSQVT

SEQ ID NO: 133 - protein, 191 aa, Artificial Sequence
  synthetic Arabidopsis PYR1 mutant E141M
MPSELTPEERSELKNSIAEFHTYQLDPGSCSSLHAQRIHAPPELVWSIVRRFDKPQTYKHFIKSCSVEQNFEMRVGCTRDVIVISGLPANTSTERLDILDDERRVTGFSIIGGEHRLTNYKSVTTVHRFEKENRIWTVVLMSYVVDMPEGNSEDDTRMFADTVVKLNLQKLATVAEAMARNSGDGSGSQVT

SEQ ID NO: 134 - protein, 191 aa, Artificial Sequence
  synthetic Arabidopsis PYR1 mutant E141N
MPSELTPEERSELKNSIAEFHTYQLDPGSCSSLHAQRIHAPPELVWSIVRRFDKPQTYKHFIKSCSVEQNFEMRVGCTRDVIVISGLPANTSTERLDILDDERRVTGFSIIGGEHRLTNYKSVTTVHRFEKENRIWTVVLNSYVVDMPEGNSEDDTRMFADTVVKLNLQKLATVAEAMARNSGDGSGSQVT

SEQ ID NO: 135 - protein, 191 aa, Artificial Sequence
  synthetic Arabidopsis PYR1 mutant E141T
MPSELTPEERSELKNSIAEFHTYQLDPGSCSSLHAQRIHAPPELVWSIVRRFDKPQTYKHFIKSCSVEQNFEMRVGCTRDVIVISGLPANTSTERLDILDDERRVTGFSIIGGEHRLTNYKSVTTVHRFEKENRIWTVVLTSYVVDMPEGNSEDDTRMFADTVVKLNLQKLATVAEAMARNSGDGSGSQVT

SEQ ID NO: 136 - protein, 191 aa, Artificial Sequence
  synthetic Arabidopsis PYR1 mutant E141V
MPSELTPEERSELKNSIAEFHTYQLDPGSCSSLHAQRIHAPPELVWSIVRRFDKPQTYKHFIKSCSVEQNFEMRVGCTRDVIVISGLPANTSTERLDILDDERRVTGFSIIGGEHRLTNYKSVTTVHRFEKENRIWTVVLVSYVVDMPEGNSEDDTRMFADTVVKLNLQKLATVAEAMARNSGDGSGSQVT

SEQ ID NO: 137 - protein, 191 aa, Artificial Sequence
  synthetic Arabidopsis PYR1 mutant E141W
MPSELTPEERSELKNSIAEFHTYQLDPGSCSSLHAQRIHAPPELVWSIVRRFDKPQTYKHFIKSCSVEQNFEMRVGCTRDVIVISGLPANTSTERLDILDDERRVTGFSIIGGEHRLTNYKSVTTVHRFEKENRIWTVVLWSYVVDMPEGNSEDDTRMFADTVVKLNLQKLATVAEAMARNSGDGSGSQVT

SEQ ID NO: 138 - protein, 191 aa, Artificial Sequence
  synthetic Arabidopsis PYR1 mutant E141Y
MPSELTPEERSELKNSIAEFHTYQLDPGSCSSLHAQRIHAPPELVWSIVRRFDKPQTYKHFIKSCSVEQNFEMRVGCTRDVIVISGLPANTSTERLDILDDERRVTGFSIIGGEHRLTNYKSVTTVHRFEKENRIWTVVLYSYVVDMPEGNSEDDTRMFADTVVKLNLQKLATVAEAMARNSGDGSGSQVT

SEQ ID NO: 139 - protein, 191 aa, Artificial Sequence
  synthetic Arabidopsis PYR1 mutant A160C
MPSELTPEERSELKNSIAEFHTYQLDPGSCSSLHAQRIHAPPELVWSIVRRFDKPQTYKHFIKSCSVEQNFEMRVGCTRDVIVISGLPANTSTERLDILDDERRVTGFSIIGGEHRLTNYKSVTTVHRFEKENRIWTVVLESYVVDMPEGNSEDDTRMFCDTVVKLNLQKLATVAEAMARNSGDGSGSQVT

SEQ ID NO: 140 - protein, 191 aa, Artificial Sequence
  synthetic Arabidopsis PYR1 mutant A160I
MPSELTPEERSELKNSIAEFHTYQLDPGSCSSLHAQRIHAPPELVWSIVRRFDKPQTYKHFIKSCSVEQNFEMRVGCTRDVIVISGLPANTSTERLDILDDERRVTGFSIIGGEHRLTNYKSVTTVHRFEKENRIWTVVLESYVVDMPEGNSEDDTRMFIDTVVKLNLQKLATVAEAMARNSGDGSGSQVT

SEQ ID NO: 141 - protein, 191 aa, Artificial Sequence
  synthetic Arabidopsis PYR1 mutant A160V
MPSELTPEERSELKNSIAEFHTYQLDPGSCSSLHAQRIHAPPELVWSIVRRFDKPQTYKHFIKSCSVEQNFEMRVGCTRDVIVISGLPANTSTERLDILDDERRVTGFSIIGGEHRLTNYKSVTTVHRFEKENRIWTVVLESYVVDMPEGNSEDDTRMFVDTVVKLNLQKLATVAEAMARNSGDGSGSQVT

SEQ ID NO: 142 - protein, 174 aa, Artificial Sequence
  synthetic middle portion of Zea mays PYR/PYL (ZmPYLc)
AGVPDEVARHHEHAVAAGQCCAAMVQSIAAPVDAVWSLVRRFDQPQRYKRFIRSCHLVDGDGAEVGSVRELLLVSGLPAESSRERLEIRDDERRVISFRVLGGDHRLANYRSVTTVHEAAPSQDGRPLTMVVESYVVDVPPGNTVEETRIFVDTIVRCNLQSLEGTVIRQLEIA

SEQ ID NO: 143 - protein, 172 aa, Artificial Sequence
  synthetic middle portion of Zea mays PYR/PYL (ZmPYLl)
AGVPDEVARHHEHAVAAGQCCSVMVQSIAAPADAVWSLVRRFDQPQGYKRFIRSCHLVDGDGVEVGSVRELLVVSGLPAENSRERLEIRDDERRVISFRILGGDHRLANYRSVTTVHEAASEGGPLTMVVESYVVDVPPGNTVEETRIFVDTIVRCNLQSLEDTVIRQQAMA

SEQ ID NO: 144 - protein, 170 aa, Artificial Sequence
  synthetic middle portion of Zea mays PYR/PYL (ZmPYLa)
CAAVPAEVARHHEHAARAGQCCSAVVQAIAAPVGAVWSVVRRFDRPQAYKHFIRSCRLVGGGDVAVGSVREVRVVSGLPATSSRERLEILDDERRVLSFRVVGGEHRLANYRSVTTVHEAGAGAGTGTVVVESYVVDVPHGNTADETRVFVDTIVRCNLQSLARTAERLA

SEQ ID NO: 145 - protein, 171 aa, Artificial Sequence
  synthetic middle portion of Zea mays PYR/PYL (ZmPYLb)
GEVPAEAARHHEHAAAGPGRCCSAVVQHVAAPAAAVWSVVRRFDQPQVYKRFVRSCALLAGDGGVGTLREVRVVSGLPAASSRERLEVLDDESHVLSFRVVGGEHRLRNYLSVTTVHPSPAAPDAATVVVESYVVDVPPGNTPEDTRVFVDTIVKCNLQSLATTAEKLAAV

SEQ ID NO: 146 - protein, 172 aa, Artificial Sequence
  synthetic middle portion of Zea mays PYR/PYL (ZmPYLo)
GEVPAEAARHHEHAAPGPGRCCSAVVQRVAAPAEAVWSVVRRFDQPQAYKRFVRSCALLAGDGGVGTLREVRVVSGLPAASSRERLEVLDDESHVLSFRVVGGEHRLQNYLSVTTVHPSPAAPDAATVVVESYVVDVPPGNTPEDTRVFVDTIVKCNLQSLATTAEKLALAA

SEQ ID NO: 147 - protein, 174 aa, Artificial Sequence
  synthetic middle portion of Zea mays PYR/PYL (ZmPYLi)
QLRSTVDAHHRYAVGEGQCSSLLAQRIHAPPEAVWAVVRRFDCPQVYKHFIRSCALRPDPEAGDALCPGRLREVSVISGLPASTSTERLDLLDDAARVFGFSITGGEHRLRNYRSVTTVSELADPAICTVVLESYVVDVPDGNTEDDTRLFADTVIRLNLQKLKSVAEANAAEA

SEQ ID NO: 148 - protein, 174 aa, Artificial Sequence
  synthetic middle portion of Zea mays PYR/PYL (ZmPYLk)
QLRPTVDAHHRYAVGEGQCSSLLAQRIHAPPAAVWAIVRRFDCPQVYKHFIRSCAVRPDPDAGDALRPGRLREVCVISGLPASTSTERLDHLDDAARVFGFSITGGEHRLRNYRSVTTVSELAGPGICTVVLESYAVDVPDGNTEDDTRLFADTVIRLNLQKLKSVAEASTSSS

SEQ ID NO: 149 - protein, 171 aa, Artificial Sequence
  synthetic middle portion of Arabidopsis thaliana PYR/PYL (AtPyrl)
ELKNSIAEFHTYQLDPGSCSSLHAQRIHAPPELVWSIVRRFDKPQTYKHFIKSCSVEQNFEMRVGCTRDVIVISGLPANTSTERLDILDDERRVTGFSIIGGEHRLTNYKSVTTVHRFEKENRIWTVVLESYVVDMPEGNSEDDTRMFADTVVKLNLQKLATVAEAMARNS

SEQ ID NO: 150 - protein, 169 aa, Artificial Sequence
  synthetic middle portion of Zea mays PYR/PYL (ZmPYLj)
ELEGVVRAHHTFPGRAPGTCTSLVTQRVDAPLAAVWPIVRGFGSPQRYKHFIKSCDLKAGDGATVGSVREVTVVSGLPASTSTERLEILDDHRHILSFRVVGGDHRLRNYRSVTSVTEFQPGPYCVVLESYVVDVPDGNTEEDTRMFTDTVVKLNLQKLAAIATSSSAN

SEQ ID NO: 151 - protein, 171 aa, Artificial Sequence
  synthetic middle portion of Zea mays PYR/PYL (ZmPYLd)
RAMETDYVRRFHRHEPRDHQCSSAVAKHIKAPVHLVWSLVRRFDQPQLFKPFVSRCEMKGNIEIGSVREVNVKSGLPATRSTERLELLDDDERILSVRFVGGDHRLQNYSSILTVHPEVIDGRPGTLVIESFVVDVPDGNTKDETCYFVEALLKCNLRSLAEVSEGQVIMD

SEQ ID NO: 152 - protein, 171 aa, Artificial Sequence
  synthetic middle portion of Zea mays PYR/PYL (ZmPYLf)
RAMETDYVRRFHRHEPREHQCSSAVAKHIKAPVHLVWSLVRRFDQPQLFKPFVSRCEMKGNIEIGSVREVNVKSGLPATRSTERLELLDDNEHILSVRFVGGDHRLQNYSSILTVHPEVIDGRPGTLVIESFVVDVPDGNTKDETCYFVEALLKCNLKSLAEVSERQVVKD

SEQ ID NO: 153 - protein, 172 aa, Artificial Sequence
  synthetic middle portion of Zea mays PYR/PYL (ZmPYLe)
AGGEAEYVRRMHRHAPTEHQCTSTLVKHIKAPVHLVWELVRRFDQPQRYKPFVRNCVVRGDQLEVGSLRDVNVKTGLPATTSTERLEQLDDDLHILGVKFVGGDHRLQNYSSIITVHPESIDGRPGTLVIESFVVDVPDGNTKDETCYFVEAVIKCNLNSLAEVSEQLAVES

SEQ ID NO: 154 - protein, 172 aa, Artificial Sequence
  synthetic middle portion of Zea mays PYR/PYL (ZmPYLg)
AGGETEYVRRLHRHAPAEHQCTSTLVKHIKAPVHLVWELVRSFDQPQRYKPFVRNCVVRGDQLEVGSLRDVNVKTGLPATTSTERLEQLDDDLHILGVKFVGGDHRLQNYSSIITVHPESIDGRPGTLVIESFVVDVPDGNTKDETCYFVEAVIKCNLKSLAEVSEQLAVES

SEQ ID NO: 155 - protein, 233 aa, Artificial Sequence
  synthetic ZmPYLc homologous to AtPYR1 A160C
MRERNSSIDQEHQRGSSSRSTMPFAASRTSQQQHSRVATNGRAVAVCAGHAGVPDEVARHHEHAVAAGQCCAAMVQSIAAPVDAVWSLVRRFDQPQRYKRFIRSCHLVDGDGAEVGSVRELLLVSGLPAESSRERLEIRDDERRVISFRVLGGDHRLANYRSVTTVHEAAPSQDGRPLTMVVESYVVDVPPGNTVEETRIFCDTIVRCNLQSLEGTVIRQLEIAAMPHDDNQN

SEQ ID NO: 156 - protein, 213 aa, Artificial Sequence
  synthetic ZmPYLl homologous to AtPYR1 A160C
MPYAATRTSPQQHSRVASNGRAVAACAGHAGVPDEVARHHEHAVAAGQCCSVMVQSIAAPADAVWSLVRRFDQPQGYKRFIRSCHLVDGDGVEVGSVRELLVVSGLPAENSRERLEIRDDERRVISFRILGGDHRLANYRSVTTVHEAASEGGPLTMVVESYVVDVPPGNTVEETRIFCDTIVRCNLQSLEDTVIRQQAMAAPAAPHNDHNHS

SEQ ID NO: 157 - protein, 200 aa, Artificial Sequence
  synthetic ZmPYLa homologous to AtPYR1 A160C
MPYTAPRPSPQQHSRVLSGGGAKAASHGASCAAVPAEVARHHEHAARAGQCCSAVVQAIAAPVGAVWSVVRRFDRPQAYKHFIRSCRLVGGGDVAVGSVREVRVVSGLPATSSRERLEILDDERRVLSFRVVGGEHRLANYRSVTTVHEAGAGAGTGTVVVESYVVDVPHGNTADETRVFCDTIVRCNLQSLARTAERLA

SEQ ID NO: 158 - protein, 220 aa, Artificial Sequence
  synthetic ZmPYLb homologous to AtPYR1 A160C
MPCIQASSPGGMPHQHGRGRVLGGGVGCAAEVAAAVAASAGGMRCGAHDGEVPAEAARHHEHAAAGPGRCCSAVVQHVAAPAAAVWSVVRRFDQPQVYKRFVRSCALLAGDGGVGTLREVRVVSGLPAASSRERLEVLDDESHVLSFRVVGGEHRLRNYLSVTTVHPSPAAPDAATVVVESYVVDVPPGNTPEDTRVFCDTIVKCNLQSLATTAEKLAAV

SEQ ID NO: 159 - protein, 218 aa, Artificial Sequence
  synthetic ZmPYLo homologous to AtPYR1 A160C
MPCLQASSPGSMPYQHHGRGVGCAAEAGAAVGASAGTGTRCGAHDGEVPAEAARHHEHAAPGPGRCCSAVVQRVAAPAEAVWSVVRRFDQPQAYKRFVRSCALLAGDGGVGTLREVRVVSGLPAASSRERLEVLDDESHVLSFRVVGGEHRLQNYLSVTTVHPSPAAPDAATVVVESYVVDVPPGNTPEDTRVFCDTIVKCNLQSLATTAEKLALAAV

SEQ ID NO: 160 - protein, 212 aa, Artificial Sequence
  synthetic ZmPYLi homologous to AtPYR1 A160C
MDQQGAGGDAEVPAGLGLTAAEYEQLRSTVDAHHRYAVGEGQCSSLLAQRIHAPPEAVWAVVRRFDCPQVYKHFIRSCALRPDPEAGDALCPGRLREVSVISGLPASTSTERLDLLDDAARVFGFSITGGEHRLRNYRSVTTVSELADPAICTVVLESYVVDVPDGNTEDDTRLFCDTVIRLNLQKLKSVAEANAAEAAATTNSVLLPRPAE

SEQ ID NO: 161 - protein, 205 aa, Artificial Sequence
  synthetic ZmPYLk homologous to AtPYR1 A160C
MDQQGAGGDVEVPAGLGLTAAEYEQLRPTVDAHHRYAVGEGQCSSLLAQRIHAPPAAVWAIVRRFDCPQVYKHFIRSCAVRPDPDAGDALRPGRLREVCVISGLPASTSTERLDHLDDAARVFGFSITGGEHRLRNYRSVTTVSELAGPGICTVVLESYAVDVPDGNTEDDTRLFCDTVIRLNLQKLKSVAEASTSSSAPPPPSE

SEQ ID NO: 162 - protein, 188 aa, Artificial Sequence
  synthetic ZmPYLj homologous to AtPYR1 A160C
MEPHMESALRQGLSEAEQRELEGVVRAHHTFPGRAPGTCTSLVTQRVDAPLAAVWPIVRGFGSPQRYKHFIKSCDLKAGDGATVGSVREVTVVSGLPASTSTERLEILDDHRHILSFRVVGGDHRLRNYRSVTSVTEFQPGPYCVVLESYVVDVPDGNTEEDTRMFCDTVVKLNLQKLAAIATSSSAN

SEQ ID NO: 163 - protein, 214 aa, Artificial Sequence
  synthetic ZmPYLd homologous to AtPYR1 A160C
MVVEMDGGVGVAAAGGGGAQTPAPPPPRRWRLADERCDLRAMETDYVRRFHRHEPRDHQCSSAVAKHIKAPVHLVWSLVRRFDQPQLFKPFVSRCEMKGNIEIGSVREVNVKSGLPATRSTERLELLDDDERILSVRFVGGDHRLQNYSSILSVTEFQPGPYCVVLESYVVDVPDGNTEEDTRMFCDTVVKLNLQKLAAIATSSSANQTEPLDR

SEQ ID NO: 164 - protein, 209 aa, Artificial Sequence
  synthetic ZmPYLf homologous to AtPYR1 A160C
MVMVEMDGGVGGGGGGGQTPAPRRWRLADERCDLRAMETDYVRRFHRHEPREHQCSSAVAKHIKAPVHLVWSLVRRFDQPQLFKPFVSRCEMKGNIEIGSVREVNVKSGLPATRSTERLELLDDNEHILSVRFVGGDHRLQNYSSILSVTEFQPGPYCVVLESYVVDVPDGNTEEDTRMFCDTVVKLNLQKLAAIATSSSANQTEPLDR

SEQ ID NO: 165 - protein, 197 aa, Artificial Sequence
  synthetic ZmPYLe homologous to AtPYR1 A160C
MVGLVGGSTARAEHVVANAGGEAEYVRRMHRHAPTEHQCTSTLVKHIKAPVHLVWELVRRFDQPQRYKPFVRNCVVRGDQLEVGSLRDVNVKTGLPATTSTERLEQLDDDLHILGVKFVGGDHRLQNYSSIITVHPESIDGRPGTLVIESFVVDVPDGNTKDETCYFCEAVIKCNLNSLAEVSEQLAVESPTSLIDQ

SEQ ID NO: 166 - protein, 197 aa, Artificial Sequence
  synthetic ZmPYLg homologous to AtPYR1 A160C
MVGLVGGSTARAEHVVANAGGETEYVRRLHRHAPAEHQCTSTLVKHIKAPVHLVWELVRSFDQPQRYKPFVRNCVVRGDQLEVGSLRDVNVKTGLPATTSTERLEQLDDDLHILGVKFVGGDHRLQNYSSIITVHPESIDGRPGTLVIESFVVDVPDGNTKDETCYFCEAVIKCNLKSLAEVSEQLAVESPTSPIDQ

SEQ ID NO: 167 - protein, 233 aa, Artificial Sequence
  synthetic ZmPYLc homologous to AtPYR1 A160I
MRERNSSIDQEHQRGSSSRSTMPFAASRTSQQQHSRVATNGRAVAVCAGHAGVPDEVARHHEHAVAAGQCCAAMVQSIAAPVDAVWSLVRRFDQPQRYKRFIRSCHLVDGDGAEVGSVRELLLVSGLPAESSRERLEIRDDERRVISFRVLGGDHRLANYRSVTTVHEAAPSQDGRPLTMVVESYVVDVPPGNTVEETRIFIDTIVRCNLQSLEGTVIRQLEIAAMPHDDNQN

SEQ ID NO: 168 - protein, 213 aa, Artificial Sequence
  synthetic ZmPYLl homologous to AtPYR1 A160I
MPYAATRTSPQQHSRVASNGRAVAACAGHAGVPDEVARHHEHAVAAGQCCSVMVQSIAAPADAVWSLVRRFDQPQGYKRFIRSCHLVDGDGVEVGSVRELLVVSGLPAENSRERLEIRDDERRVISFRILGGDHRLANYRSVTTVHEAASEGGPLTMVVESYVVDVPPGNTVEETRIFIDTIVRCNLQSLEDTVIRQQAMAAPAAPHNDHNHS

SEQ ID NO: 169 - protein, 200 aa, Artificial Sequence
  synthetic ZmPYLa homologous to AtPYR1 A160I
MPYTAPRPSPQQHSRVLSGGGAKAASHGASCAAVPAEVARHHEHAARAGQCCSAVVQAIAAPVGAVWSVVRRFDRPQAYKHFIRSCRLVGGGDVAVGSVREVRVVSGLPATSSRERLEILDDERRVLSFRVVGGEHRLANYRSVTTVHEAGAGAGTGTVVVESYVVDVPHGNTADETRVFIDTIVRCNLQSLARTAERLA

SEQ ID NO: 170 - protein, 220 aa, Artificial Sequence
  synthetic ZmPYLb homologous to AtPYR1 A160I
MPCIQASSPGGMPHQHGRGRVLGGGVGCAAEVAAAVAASAGGMRCGAHDGEVPAEAARHHEHAAAGPGRCCSAVVQHVAAPAAAVWSVVRRFDQPQVYKRFVRSCALLAGDGGVGTLREVRVVSGLPAASSRERLEVLDDESHVLSFRVVGGEHRLRNYLSVTTVHPSPAAPDAATVVVESYVVDVPPGNTPEDTRVFIDTIVKCNLQSLATTAEKLAAV

SEQ ID NO: 171 - protein, 218 aa, Artificial Sequence
  synthetic ZmPYLo homologous to AtPYR1 A160I
MPCLQASSPGSMPYQHHGRGVGCAAEAGAAVGASAGTGTRCGAHDGEVPAEAARHHEHAAPGPGRCCSAVVQRVAAPAEAVWSVVRRFDQPQAYKRFVRSCALLAGDGGVGTLREVRVVSGLPAASSRERLEVLDDESHVLSFRVVGGEHRLQNYLSVTTVHPSPAAPDAATVVVESYVVDVPPGNTPEDTRVFIDTIVKCNLQSLATTAEKLALAAV

SEQ ID NO: 172 - protein, 212 aa, Artificial Sequence
  synthetic ZmPYLi homologous to AtPYR1 A160I
MDQQGAGGDAEVPAGLGLTAAEYEQLRSTVDAHHRYAVGEGQCSSLLAQRIHAPPEAVWAVVRRFDCPQVYKHFIRSCALRPDPEAGDALCPGRLREVSVISGLPASTSTERLDLLDDAARVFGFSITGGEHRLRNYRSVTTVSELADPAICTVVLESYVVDVPDGNTEDDTRLFIDTVIRLNLQKLKSVAEANAAEAAATTNSVLLPRPAE

SEQ ID NO: 173 - protein, 205 aa, Artificial Sequence
  synthetic ZmPYLk homologous to AtPYR1 A160I
MDQQGAGGDVEVPAGLGLTAAEYEQLRPTVDAHHRYAVGEGQCSSLLAQRIHAPPAAVWAIVRRFDCPQVYKHFIRSCAVRPDPDAGDALRPGRLREVCVISGLPASTSTERLDHLDDAARVFGFSITGGEHRLRNYRSVTTVSELAGPGICTVVLESYAVDVPDGNTEDDTRLFIDTVIRLNLQKLKSVAEASTSSSAPPPPSE

SEQ ID NO: 174 - protein, 188 aa, Artificial Sequence
  synthetic ZmPYLj homologous to AtPYR1 A160I
MEPHMESALRQGLSEAEQRELEGVVRAHHTFPGRAPGTCTSLVTQRVDAPLAAVWPIVRGFGSPQRYKHFIKSCDLKAGDGATVGSVREVTVVSGLPASTSTERLEILDDHRHILSFRVVGGDHRLRNYRSVTSVTEFQPGPYCVVLESYVVDVPDGNTEEDTRMFIDTVVKLNLQKLAAIATSSSAN

SEQ ID NO: 175 - protein, 214 aa, Artificial Sequence
  synthetic ZmPYLd homologous to AtPYR1 A160I
MVVEMDGGVGVAAAGGGGAQTPAPPPPRRWRLADERCDLRAMETDYVRRFHRHEPRDHQCSSAVAKHIKAPVHLVWSLVRRFDQPQLFKPFVSRCEMKGNIEIGSVREVNVKSGLPATRSTERLELLDDDERILSVRFVGGDHRLQNYSSILSVTEFQPGPYCVVLESYVVDVPDGNTEEDTRMFIDTVVKLNLQKLAAIATSSSANQTEPLDR

SEQ ID NO: 176 - protein, 209 aa, Artificial Sequence
  synthetic ZmPYLf homologous to AtPYR1 A160I
MVMVEMDGGVGGGGGGGQTPAPRRWRLADERCDLRAMETDYVRRFHRHEPREHQCSSAVAKHIKAPVHLVWSLVRRFDQPQLFKPFVSRCEMKGNIEIGSVREVNVKSGLPATRSTERLELLDDNEHILSVRFVGGDHRLQNYSSILSVTEFQPGPYCVVLESYVVDVPDGNTEEDTRMFIDTVVKLNLQKLAAIATSSSANQTEPLDR

SEQ ID NO: 177 - protein, 197 aa, Artificial Sequence
  synthetic ZmPYLe homologous to AtPYR1 A160I
MVGLVGGSTARAEHVVANAGGEAEYVRRMHRHAPTEHQCTSTLVKHIKAPVHLVWELVRRFDQPQRYKPFVRNCVVRGDQLEVGSLRDVNVKTGLPATTSTERLEQLDDDLHILGVKFVGGDHRLQNYSSIITVHPESIDGRPGTLVIESFVVDVPDGNTKDETCYFIEAVIKCNLNSLAEVSEQLAVESPTSLIDQ

SEQ ID NO: 178 - protein, 197 aa, Artificial Sequence
  synthetic ZmPYLg homologous to AtPYR1 A160I
MVGLVGGSTARAEHVVANAGGETEYVRRLHRHAPAEHQCTSTLVKHIKAPVHLVWELVRSFDQPQRYKPFVRNCVVRGDQLEVGSLRDVNVKTGLPATTSTERLEQLDDDLHILGVKFVGGDHRLQNYSSIITVHPESIDGRPGTLVIESFVVDVPDGNTKDETCYFIEAVIKCNLKSLAEVSEQLAVESPTSPIDQ

SEQ ID NO: 179 - protein, 212 aa, Artificial Sequence
  synthetic ZmPYLi homologous to AtPYR1 A160V
MDQQGAGGDAEVPAGLGLTAAEYEQLRSTVDAHHRYAVGEGQCSSLLAQRIHAPPEAVWAVVRRFDCPQVYKHFIRSCALRPDPEAGDALCPGRLREVSVISGLPASTSTERLDLLDDAARVFGFSITGGEHRLRNYRSVTTVSELADPAICTVVLESYVVDVPDGNTEDDTRLFADTVIRLNLQKLKSVAEANAAEAAATTNSVLLPRPAE

SEQ ID NO: 180 - protein, 205 aa, Artificial Sequence; identical to SEQ ID NO: 91
  synthetic ZmPYLk homologous to AtPYR1 A160V

SEQ ID NO: 181 - protein, 188 aa, Artificial Sequence; identical to SEQ ID NO: 90
  synthetic ZmPYLj homologous to AtPYR1 A160V

SEQ ID NO: 182 - protein, 233 aa, Artificial Sequence
  synthetic ZmPYLc homologous to AtPYR1 E141C
MRERNSSIDQEHQRGSSSRSTMPFAASRTSQQQHSRVATNGRAVAVCAGHAGVPDEVARHHEHAVAAGQCCAAMVQSIAAPVDAVWSLVRRFDQPQRYKRFIRSCHLVDGDGAEVGSVRELLLVSGLPAESSRERLEIRDDERRVISFRVLGGDHRLANYRSVTTVHEAAPSQDGRPLTMVVCSYVVDVPPGNTVEETRIFVDTIVRCNLQSLEGTVIRQLEIAAMPHDDNQN

SEQ ID NO: 183 - protein, 213 aa, Artificial Sequence
  synthetic ZmPYLl homologous to AtPYR1 E141C
MPYAATRTSPQQHSRVASNGRAVAACAGHAGVPDEVARHHEHAVAAGQCCSVMVQSIAAPADAVWSLVRRFDQPQGYKRFIRSCHLVDGDGVEVGSVRELLVVSGLPAENSRERLEIRDDERRVISFRILGGDHRLANYRSVTTVHEAASEGGPLTMVVCSYVVDVPPGNTVEETRIFVDTIVRCNLQSLEDTVIRQQAMAAPAAPHNDHNHS

SEQ ID NO: 184 - protein, 200 aa, Artificial Sequence
  synthetic ZmPYLa homologous to AtPYR1 E141C
MPYTAPRPSPQQHSRVLSGGGAKAASHGASCAAVPAEVARHHEHAARAGQCCSAVVQAIAAPVGAVWSVVRRFDRPQAYKHFIRSCRLVGGGDVAVGSVREVRVVSGLPATSSRERLEILDDERRVLSFRVVGGEHRLANYRSVTTVHEAGAGAGTGTVVVCSYVVDVPHGNTADETRVFVDTIVRCNLQSLARTAERLA

SEQ ID NO: 185 - protein, 220 aa, Artificial Sequence
  synthetic ZmPYLb homologous to AtPYR1 E141C
MPCIQASSPGGMPHQHGRGRVLGGGVGCAAEVAAAVAASAGGMRCGAHDGEVPAEAARHHEHAAAGPGRCCSAVVQHVAAPAAAVWSVVRRFDQPQVYKRFVRSCALLAGDGGVGTLREVRVVSGLPAASSRERLEVLDDESHVLSFRVVGGEHRLRNYLSVTTVHPSPAAPDAATVVVCSYVVDVPPGNTPEDTRVFVDTIVKCNLQSLATTAEKLAAV

SEQ ID NO: 186 - protein, 218 aa, Artificial Sequence
  synthetic ZmPYLo homologous to AtPYR1 E141C
MPCLQASSPGSMPYQHHGRGVGCAAEAGAAVGASAGTGTRCGAHDGEVPAEAARHHEHAAPGPGRCCSAVVQRVAAPAEAVWSVVRRFDQPQAYKRFVRSCALLAGDGGVGTLREVRVVSGLPAASSRERLEVLDDESHVLSFRVVGGEHRLQNYLSVTTVHPSPAAPDAATVVVCSYVVDVPPGNTPEDTRVFVDTIVKCNLQSLATTAEKLALAAV

SEQ ID NO: 187 - protein, 212 aa, Artificial Sequence
  synthetic ZmPYLi homologous to AtPYR1 E141C
MDQQGAGGDAEVPAGLGLTAAEYEQLRSTVDAHHRYAVGEGQCSSLLAQRIHAPPEAVWAVVRRFDCPQVYKHFIRSCALRPDPEAGDALCPGRLREVSVISGLPASTSTERLDLLDDAARVFGFSITGGEHRLRNYRSVTTVSELADPAICTVVLCSYVVDVPDGNTEDDTRLFADTVIRLNLQKLKSVAEANAAEAAATTNSVLLPRPAE

SEQ ID NO: 188 - protein, 205 aa, Artificial Sequence
  synthetic ZmPYLk homologous to AtPYR1 E141C
MDQQGAGGDVEVPAGLGLTAAEYEQLRPTVDAHHRYAVGEGQCSSLLAQRIHAPPAAVWAIVRRFDCPQVYKHFIRSCAVRPDPDAGDALRPGRLREVCVISGLPASTSTERLDHLDDAARVFGFSITGGEHRLRNYRSVTTVSELAGPGICTVVLCSYAVDVPDGNTEDDTRLFADTVIRLNLQKLKSVAEASTSSSAPPPPSE

SEQ ID NO: 189 - protein, 188 aa, Artificial Sequence
  synthetic ZmPYLj homologous to AtPYR1 E141C
MEPHMESALRQGLSEAEQRELEGVVRAHHTFPGRAPGTCTSLVTQRVDAPLAAVWPIVRGFGSPQRYKHFIKSCDLKAGDGATVGSVREVTVVSGLPASTSTERLEILDDHRHILSFRVVGGDHRLRNYRSVTSVTEFQPGPYCVVLCSYVVDVPDGNTEEDTRMFTDTVVKLNLQKLAAIATSSSAN

SEQ ID NO: 190 - protein, 214 aa, Artificial Sequence
  synthetic ZmPYLd homologous to AtPYR1 E141C
MVVEMDGGVGVAAAGGGGAQTPAPPPPRRWRLADERCDLRAMETDYVRRFHRHEPRDHQCSSAVAKHIKAPVHLVWSLVRRFDQPQLFKPFVSRCEMKGNIEIGSVREVNVKSGLPATRSTERLELLDDDERILSVRFVGGDHRLQNYSSILSVTEFQPGPYCVVLCSYVVDVPDGNTEEDTRMFTDTVVKLNLQKLAAIATSSSANQTEPLDR

SEQ ID NO: 191 - protein, 209 aa, Artificial Sequence
  synthetic ZmPYLf homologous to AtPYR1 E141C
MVMVEMDGGVGGGGGGGQTPAPRRWRLADERCDLRAMETDYVRRFHRHEPREHQCSSAVAKHIKAPVHLVWSLVRRFDQPQLFKPFVSRCEMKGNIEIGSVREVNVKSGLPATRSTERLELLDDNEHILSVRFVGGDHRLQNYSSILSVTEFQPGPYCVVLCSYVVDVPDGNTEEDTRMFTDTVVKLNLQKLAAIATSSSANQTEPLDR

SEQ ID NO: 192 - protein, 197 aa, Artificial Sequence
  synthetic ZmPYLe homologous to AtPYR1 E141C
MVGLVGGSTARAEHVVANAGGEAEYVRRMHRHAPTEHQCTSTLVKHIKAPVHLVWELVRRFDQPQRYKPFVRNCVVRGDQLEVGSLRDVNVKTGLPATTSTERLEQLDDDLHILGVKFVGGDHRLQNYSSIITVHPESIDGRPGTLVICSFVVDVPDGNTKDETCYFVEAVIKCNLNSLAEVSEQLAVESPTSLIDQ

SEQ ID NO: 193 - protein, 197 aa, Artificial Sequence
  synthetic ZmPYLg homologous to AtPYR1 E141C
MVGLVGGSTARAEHVVANAGGETEYVRRLHRHAPAEHQCTSTLVKHIKAPVHLVWELVRSFDQPQRYKPFVRNCVVRGDQLEVGSLRDVNVKTGLPATTSTERLEQLDDDLHILGVKFVGGDHRLQNYSSIITVHPESIDGRPGTLVICSFVVDVPDGNTKDETCYFVEAVIKCNLKSLAEVSEQLAVESPTSPIDQ

SEQ ID NO: 194 - protein, 233 aa, Artificial Sequence
  synthetic ZmPYLc homologous to AtPYR1 E141I
MRERNSSIDQEHQRGSSSRSTMPFAASRTSQQQHSRVATNGRAVAVCAGHAGVPDEVARHHEHAVAAGQCCAAMVQSIAAPVDAVWSLVRRFDQPQRYKRFIRSCHLVDGDGAEVGSVRELLLVSGLPAESSRERLEIRDDERRVISFRVLGGDHRLANYRSVTTVHEAAPSQDGRPLTMVVISYVVDVPPGNTVEETRIFVDTIVRCNLQSLEGTVIRQLEIAAMPHDDNQN

SEQ ID NO: 195 - protein, 213 aa, Artificial Sequence
  synthetic ZmPYLl homologous to AtPYR1 E141I
MPYAATRTSPQQHSRVASNGRAVAACAGHAGVPDEVARHHEHAVAAGQCCSVMVQSIAAPADAVWSLVRRFDQPQGYKRFIRSCHLVDGDGVEVGSVRELLVVSGLPAENSRERLEIRDDERRVISFRILGGDHRLANYRSVTTVHEAASEGGPLTMVVISYVVDVPPGNTVEETRIFVDTIVRCNLQSLEDTVIRQQAMAAPAAPHNDHNHS

SEQ ID NO: 196 - protein, 200 aa, Artificial Sequence
  synthetic ZmPYLa homologous to AtPYR1 E141I
MPYTAPRPSPQQHSRVLSGGGAKAASHGASCAAVPAEVARHHEHAARAGQCCSAVVQAIAAPVGAVWSVVRRFDRPQAYKHFIRSCRLVGGGDVAVGSVREVRVVSGLPATSSRERLEILDDERRVLSFRVVGGEHRLANYRSVTTVHEAGAGAGTGTVVVISYVVDVPHGNTADETRVFVDTIVRCNLQSLARTAERLA

SEQ ID NO: 197 - protein, 220 aa, Artificial Sequence
  synthetic ZmPYLb homologous to AtPYR1 E141I
MPCIQASSPGGMPHQHGRGRVLGGGVGCAAEVAAAVAASAGGMRCGAHDGEVPAEAARHHEHAAAGPGRCCSAVVQHVAAPAAAVWSVVRRFDQPQVYKRFVRSCALLAGDGGVGTLREVRVVSGLPAASSRERLEVLDDESHVLSFRVVGGEHRLRNYLSVTTVHPSPAAPDAATVVVISYVVDVPPGNTPEDTRVFVDTIVKCNLQSLATTAEKLAAV

SEQ ID NO: 198 - protein, 218 aa, Artificial Sequence
  synthetic ZmPYLo homologous to AtPYR1 E141I
MPCLQASSPGSMPYQHHGRGVGCAAEAGAAVGASAGTGTRCGAHDGEVPAEAARHHEHAAPGPGRCCSAVVQRVAAPAEAVWSVVRRFDQPQAYKRFVRSCALLAGDGGVGTLREVRVVSGLPAASSRERLEVLDDESHVLSFRVVGGEHRLQNYLSVTTVHPSPAAPDAATVVVISYVVDVPPGNTPEDTRVFVDTIVKCNLQSLATTAEKLALAAV

SEQ ID NO: 199 - protein, 212 aa, Artificial Sequence
  synthetic ZmPYLi homologous to AtPYR1 E141I
MDQQGAGGDAEVPAGLGLTAAEYEQLRSTVDAHHRYAVGEGQCSSLLAQRIHAPPEAVWAVVRRFDCPQVYKHFIRSCALRPDPEAGDALCPGRLREVSVISGLPASTSTERLDLLDDAARVFGFSITGGEHRLRNYRSVTTVSELADPAICTVVLISYVVDVPDGNTEDDTRLFADTVIRLNLQKLKSVAEANAAEAAATTNSVLLPRPAE

SEQ ID NO: 200 - protein, 205 aa, Artificial Sequence
  synthetic ZmPYLk homologous to AtPYR1 E141I
MDQQGAGGDVEVPAGLGLTAAEYEQLRPTVDAHHRYAVGEGQCSSLLAQRIHAPPAAVWAIVRRFDCPQVYKHFIRSCAVRPDPDAGDALRPGRLREVCVISGLPASTSTERLDHLDDAARVFGFSITGGEHRLRNYRSVTTVSELAGPGICTVVLISYAVDVPDGNTEDDTRLFADTVIRLNLQKLKSVAEASTSSSAPPPPSE

SEQ ID NO: 201 - protein, 188 aa, Artificial Sequence
  synthetic ZmPYLj homologous to AtPYR1 E141I
MEPHMESALRQGLSEAEQRELEGVVRAHHTFPGRAPGTCTSLVTQRVDAPLAAVWPIVRGFGSPQRYKHFIKSCDLKAGDGATVGSVREVTVVSGLPASTSTERLEILDDHRHILSFRVVGGDHRLRNYRSVTSVTEFQPGPYCVVLISYVVDVPDGNTEEDTRMFTDTVVKLNLQKLAAIATSSSAN

SEQ ID NO: 202 - protein, 214 aa, Artificial Sequence
  synthetic ZmPYLd homologous to AtPYR1 E141I
MVVEMDGGVGVAAAGGGGAQTPAPPPPRRWRLADERCDLRAMETDYVRRFHRHEPRDHQCSSAVAKHIKAPVHLVWSLVRRFDQPQLFKPFVSRCEMKGNIEIGSVREVNVKSGLPATRSTERLELLDDDERILSVRFVGGDHRLQNYSSILSVTEFQPGPYCVVLISYVVDVPDGNTEEDTRMFTDTVVKLNLQKLAAIATSSSANQTEPLDR

SEQ ID NO: 203 - protein, 209 aa, Artificial Sequence
  synthetic ZmPYLf homologous to AtPYR1 E141I
MVMVEMDGGVGGGGGGGQTPAPRRWRLADERCDLRAMETDYVRRFHRHEPREHQCSSAVAKHIKAPVHLVWSLVRRFDQPQLFKPFVSRCEMKGNIEIGSVREVNVKSGLPATRSTERLELLDDNEHILSVRFVGGDHRLQNYSSILSVTEFQPGPYCVVLISYVVDVPDGNTEEDTRMFTDTVVKLNLQKLAAIATSSSANQTEPLDR

SEQ ID NO: 204 - protein, 197 aa, Artificial Sequence
  synthetic ZmPYLe homologous to AtPYR1 E141I
MVGLVGGSTARAEHVVANAGGEAEYVRRMHRHAPTEHQCTSTLVKHIKAPVHLVWELVRRFDQPQRYKPFVRNCVVRGDQLEVGSLRDVNVKTGLPATTSTERLEQLDDDLHILGVKFVGGDHRLQNYSSIITVHPESIDGRPGTLVIISFVVDVPDGNTKDETCYFVEAVIKCNLNSLAEVSEQLAVESPTSLIDQ

SEQ ID NO: 205 - protein, 197 aa, Artificial Sequence
  synthetic ZmPYLg homologous to AtPYR1 E141I
MVGLVGGSTARAEHVVANAGGETEYVRRLHRHAPAEHQCTSTLVKHIKAPVHLVWELVRSFDQPQRYKPFVRNCVVRGDQLEVGSLRDVNVKTGLPATTSTERLEQLDDDLHILGVKFVGGDHRLQNYSSIITVHPESIDGRPGTLVIISFVVDVPDGNTKDETCYFVEAVIKCNLKSLAEVSEQLAVESPTSPIDQ

SEQ ID NO: 206 - protein, 233 aa, Artificial Sequence
  synthetic ZmPYLc homologous to AtPYR1 E141L
MRERNSSIDQEHQRGSSSRSTMPFAASRTSQQQHSRVATNGRAVAVCAGHAGVPDEVARHHEHAVAAGQCCAAMVQSIAAPVDAVWSLVRRFDQPQRYKRFIRSCHLVDGDGAEVGSVRELLLVSGLPAESSRERLEIRDDERRVISFRVLGGDHRLANYRSVTTVHEAAPSQDGRPLTMVVLSYVVDVPPGNTVEETRIFVDTIVRCNLQSLEGTVIRQLEIAAMPHDDNQN

SEQ ID NO: 207 - protein, 213 aa, Artificial Sequence
  synthetic ZmPYLl homologous to AtPYR1 E141L
MPYAATRTSPQQHSRVASNGRAVAACAGHAGVPDEVARHHEHAVAAGQCCSVMVQSIAAPADAVWSLVRRFDQPQGYKRFIRSCHLVDGDGVEVGSVRELLVVSGLPAENSRERLEIRDDERRVISFRILGGDHRLANYRSVTTVHEAASEGGPLTMVVLSYVVDVPPGNTVEETRIFVDTIVRCNLQSLEDTVIRQQAMAAPAAPHNDHNHS

SEQ ID NO: 208 - protein, 200 aa, Artificial Sequence
  synthetic ZmPYLa homologous to AtPYR1 E141L
MPYTAPRPSPQQHSRVLSGGGAKAASHGASCAAVPAEVARHHEHAARAGQCCSAVVQAIAAPVGAVWSVVRRFDRPQAYKHFIRSCRLVGGGDVAVGSVREVRVVSGLPATSSRERLEILDDERRVLSFRVVGGEHRLANYRSVTTVHEAGAGAGTGTVVVLSYVVDVPHGNTADETRVFVDTIVRCNLQSLARTAERLA

SEQ ID NO: 209 - protein, 220 aa, Artificial Sequence
  synthetic ZmPYLb homologous to AtPYR1 E141L
MPCIQASSPGGMPHQHGRGRVLGGGVGCAAEVAAAVAASAGGMRCGAHDGEVPAEAARHHEHAAAGPGRCCSAVVQHVAAPAAAVWSVVRRFDQPQVYKRFVRSCALLAGDGGVGTLREVRVVSGLPAASSRERLEVLDDESHVLSFRVVGGEHRLRNYLSVTTVHPSPAAPDAATVVVLSYVVDVPPGNTPEDTRVFVDTIVKCNLQSLATTAEKLAAV

SEQ ID NO: 210 - protein, 218 aa, Artificial Sequence
  synthetic ZmPYLo homologous to AtPYR1 E141L
MPCLQASSPGSMPYQHHGRGVGCAAEAGAAVGASAGTGTRCGAHDGEVPAEAARHHEHAAPGPGRCCSAVVQRVAAPAEAVWSVVRRFDQPQAYKRFVRSCALLAGDGGVGTLREVRVVSGLPAASSRERLEVLDDESHVLSFRVVGGEHRLQNYLSVTTVHPSPAAPDAATVVVLSYVVDVPPGNTPEDTRVFVDTIVKCNLQSLATTAEKLALAAV

SEQ ID NO: 211 - protein, 212 aa, Artificial Sequence
  synthetic ZmPYLi homologous to AtPYR1 E141L
MDQQGAGGDAEVPAGLGLTAAEYEQLRSTVDAHHRYAVGEGQCSSLLAQRIHAPPEAVWAVVRRFDCPQVYKHFIRSCALRPDPEAGDALCPGRLREVSVISGLPASTSTERLDLLDDAARVFGFSITGGEHRLRNYRSVTTVSELADPAICTVVLLSYVVDVPDGNTEDDTRLFADTVIRLNLQKLKSVAEANAAEAAATTNSVLLPRPAE

SEQ ID NO: 212 - protein, 205 aa, Artificial Sequence
  synthetic ZmPYLk homologous to AtPYR1 E141L
MDQQGAGGDVEVPAGLGLTAAEYEQLRPTVDAHHRYAVGEGQCSSLLAQRIHAPPAAVWAIVRRFDCPQVYKHFIRSCAVRPDPDAGDALRPGRLREVCVISGLPASTSTERLDHLDDAARVFGFSITGGEHRLRNYRSVTTVSELAGPGICTVVLLSYAVDVPDGNTEDDTRLFADTVIRLNLQKLKSVAEASTSSSAPPPPSE

SEQ ID NO: 213 - protein, 188 aa, Artificial Sequence
  synthetic ZmPYLj homologous to AtPYR1 E141L
MEPHMESALRQGLSEAEQRELEGVVRAHHTFPGRAPGTCTSLVTQRVDAPLAAVWPIVRGFGSPQRYKHFIKSCDLKAGDGATVGSVREVTVVSGLPASTSTERLEILDDHRHILSFRVVGGDHRLRNYRSVTSVTEFQPGPYCVVLLSYVVDVPDGNTEEDTRMFTDTVVKLNLQKLAAIATSSSAN

SEQ ID NO: 214 - protein, 214 aa, Artificial Sequence
  synthetic ZmPYLd homologous to AtPYR1 E141L
MVVEMDGGVGVAAAGGGGAQTPAPPPPRRWRLADERCDLRAMETDYVRRFHRHEPRDHQCSSAVAKHIKAPVHLVWSLVRRFDQPQLFKPFVSRCEMKGNIEIGSVREVNVKSGLPATRSTERLELLDDDERILSVRFVGGDHRLQNYSSILSVTEFQPGPYCVVLLSYVVDVPDGNTEEDTRMFTDTVVKLNLQKLAAIATSSSANQTEPLDR

SEQ ID NO: 215 - protein, 209 aa, Artificial Sequence
  synthetic ZmPYLf homologous to AtPYR1 E141L
MVMVEMDGGVGGGGGGGQTPAPRRWRLADERCDLRAMETDYVRRFHRHEPREHQCSSAVAKHIKAPVHLVWSLVRRFDQPQLFKPFVSRCEMKGNIEIGSVREVNVKSGLPATRSTERLELLDDNEHILSVRFVGGDHRLQNYSSILSVTEFQPGPYCVVLLSYVVDVPDGNTEEDTRMFTDTVVKLNLQKLAAIATSSSANQTEPLDR

SEQ ID NO: 216 - protein, 197 aa, Artificial Sequence
  synthetic ZmPYLe homologous to AtPYR1 E141L
MVGLVGGSTARAEHVVANAGGEAEYVRRMHRHAPTEHQCTSTLVKHIKAPVHLVWELVRRFDQPQRYKPFVRNCVVRGDQLEVGSLRDVNVKTGLPATTSTERLEQLDDDLHILGVKFVGGDHRLQNYSSIITVHPESIDGRPGTLVILSFVVDVPDGNTKDETCYFVEAVIKCNLNSLAEVSEQLAVESPTSLIDQ

SEQ ID NO: 217 - protein, 197 aa, Artificial Sequence
  synthetic ZmPYLg homologous to AtPYR1 E141L
MVGLVGGSTARAEHVVANAGGETEYVRRLHRHAPAEHQCTSTLVKHIKAPVHLVWELVRSFDQPQRYKPFVRNCVVRGDQLEVGSLRDVNVKTGLPATTSTERLEQLDDDLHILGVKFVGGDHRLQNYSSIITVHPESIDGRPGTLVILSFVVDVPDGNTKDETCYFVEAVIKCNLKSLAEVSEQLAVESPTSPIDQ

SEQ ID NO: 218 - protein, 233 aa, Artificial Sequence
  synthetic ZmPYLc homologous to AtPYR1 E141M
MRERNSSIDQEHQRGSSSRSTMPFAASRTSQQQHSRVATNGRAVAVCAGHAGVPDEVARHHEHAVAAGQCCAAMVQSIAAPVDAVWSLVRRFDQPQRYKRFIRSCHLVDGDGAEVGSVRELLLVSGLPAESSRERLEIRDDERRVISFRVLGGDHRLANYRSVTTVHEAAPSQDGRPLTMVVMSYVVDVPPGNTVEETRIFVDTIVRCNLQSLEGTVIRQLEIAAMPHDDNQN

SEQ ID NO: 219 - protein, 213 aa, Artificial Sequence
  synthetic ZmPYLl homologous to AtPYR1 E141M
MPYAATRTSPQQHSRVASNGRAVAACAGHAGVPDEVARHHEHAVAAGQCCSVMVQSIAAPADAVWSLVRRFDQPQGYKRFIRSCHLVDGDGVEVGSVRELLVVSGLPAENSRERLEIRDDERRVISFRILGGDHRLANYRSVTTVHEAASEGGPLTMVVMSYVVDVPPGNTVEETRIFVDTIVRCNLQSLEDTVIRQQAMAAPAAPHNDHNHS

SEQ ID NO: 220 - protein, 200 aa, Artificial Sequence
  synthetic ZmPYLa homologous to AtPYR1 E141M
MPYTAPRPSPQQHSRVLSGGGAKAASHGASCAAVPAEVARHHEHAARAGQCCSAVVQAIAAPVGAVWSVVRRFDRPQAYKHFIRSCRLVGGGDVAVGSVREVRVVSGLPATSSRERLEILDDERRVLSFRVVGGEHRLANYRSVTTVHEAGAGAGTGTVVVMSYVVDVPHGNTADETRVFVDTIVRCNLQSLARTAERLA

SEQ ID NO: 221 - protein, 220 aa, Artificial Sequence
  synthetic ZmPYLb homologous to AtPYR1 E141M
MPCIQASSPGGMPHQHGRGRVLGGGVGCAAEVAAAVAASAGGMRCGAHDGEVPAEAARHHEHAAAGPGRCCSAVVQHVAAPAAAVWSVVRRFDQPQVYKRFVRSCALLAGDGGVGTLREVRVVSGLPAASSRERLEVLDDESHVLSFRVVGGEHRLRNYLSVTTVHPSPAAPDAATVVVMSYVVDVPPGNTPEDTRVFVDTIVKCNLQSLATTAEKLAAV

SEQ ID NO: 222 - protein, 218 aa, Artificial Sequence
  synthetic ZmPYLo homologous to AtPYR1 E141M
MPCLQASSPGSMPYQHHGRGVGCAAEAGAAVGASAGTGTRCGAHDGEVPAEAARHHEHAAPGPGRCCSAVVQRVAAPAEAVWSVVRRFDQPQAYKRFVRSCALLAGDGGVGTLREVRVVSGLPAASSRERLEVLDDESHVLSFRVVGGEHRLQNYLSVTTVHPSPAAPDAATVVVMSYVVDVPPGNTPEDTRVFVDTIVKCNLQSLATTAEKLALAAV

SEQ ID NO: 223 - protein, 212 aa, Artificial Sequence
  synthetic ZmPYLi homologous to AtPYR1 E141M
MDQQGAGGDAEVPAGLGLTAAEYEQLRSTVDAHHRYAVGEGQCSSLLAQRIHAPPEAVWAVVRRFDCPQVYKHFIRSCALRPDPEAGDALCPGRLREVSVISGLPASTSTERLDLLDDAARVFGFSITGGEHRLRNYRSVTTVSELADPAICTVVLMSYVVDVPDGNTEDDTRLFADTVIRLNLQKLKSVAEANAAEAAATTNSVLLPRPAE

SEQ ID NO: 224 - protein, 205 aa, Artificial Sequence
  synthetic ZmPYLk homologous to AtPYR1 E141M
MDQQGAGGDVEVPAGLGLTAAEYEQLRPTVDAHHRYAVGEGQCSSLLAQRIHAPPAAVWAIVRRFDCPQVYKHFIRSCAVRPDPDAGDALRPGRLREVCVISGLPASTSTERLDHLDDAARVFGFSITGGEHRLRNYRSVTTVSELAGPGICTVVLMSYAVDVPDGNTEDDTRLFADTVIRLNLQKLKSVAEASTSSSAPPPPSE

SEQ ID NO: 225 - protein, 188 aa, Artificial Sequence
  synthetic ZmPYLj homologous to AtPYR1 E141M
MEPHMESALRQGLSEAEQRELEGVVRAHHTFPGRAPGTCTSLVTQRVDAPLAAVWPIVRGFGSPQRYKHFIKSCDLKAGDGATVGSVREVTVVSGLPASTSTERLEILDDHRHILSFRVVGGDHRLRNYRSVTSVTEFQPGPYCVVLMSYVVDVPDGNTEEDTRMFTDTVVKLNLQKLAAIATSSSAN

SEQ ID NO: 226 - protein, 214 aa, Artificial Sequence
  synthetic ZmPYLd homologous to AtPYR1 E141M
MVVEMDGGVGVAAAGGGGAQTPAPPPPRRWRLADERCDLRAMETDYVRRFHRHEPRDHQCSSAVAKHIKAPVHLVWSLVRRFDQPQLFKPFVSRCEMKGNIEIGSVREVNVKSGLPATRSTERLELLDDDERILSVRFVGGDHRLQNYSSILSVTEFQPGPYCVVLMSYVVDVPDGNTEEDTRMFTDTVVKLNLQKLAAIATSSSANQTEPLDR

SEQ ID NO: 227 - protein, 209 aa, Artificial Sequence
  synthetic ZmPYLf homologous to AtPYR1 E141M
MVMVEMDGGVGGGGGGGQTPAPRRWRLADERCDLRAMETDYVRRFHRHEPREHQCSSAVAKHIKAPVHLVWSLVRRFDQPQLFKPFVSRCEMKGNIEIGSVREVNVKSGLPATRSTERLELLDDNEHILSVRFVGGDHRLQNYSSILSVTEFQPGPYCVVLMSYVVDVPDGNTEEDTRMFTDTVVKLNLQKLAAIATSSSANQTEPLDR

SEQ ID NO: 228 - protein, 197 aa, Artificial Sequence
  synthetic ZmPYLe homologous to AtPYR1 E141M
MVGLVGGSTARAEHVVANAGGEAEYVRRMHRHAPTEHQCTSTLVKHIKAPVHLVWELVRRFDQPQRYKPFVRNCVVRGDQLEVGSLRDVNVKTGLPATTSTERLEQLDDDLHILGVKFVGGDHRLQNYSSIITVHPESIDGRPGTLVIMSFVVDVPDGNTKDETCYFVEAVIKCNLNSLAEVSEQLAVESPTSLIDQ

SEQ ID NO: 229 - protein, 197 aa, Artificial Sequence
  synthetic ZmPYLg homologous to AtPYR1 E141M
MVGLVGGSTARAEHVVANAGGETEYVRRLHRHAPAEHQCTSTLVKHIKAPVHLVWELVRSFDQPQRYKPFVRNCVVRGDQLEVGSLRDVNVKTGLPATTSTERLEQLDDDLHILGVKFVGGDHRLQNYSSIITVHPESIDGRPGTLVIMSFVVDVPDGNTKDETCYFVEAVIKCNLKSLAEVSEQLAVESPTSPIDQ

SEQ ID NO: 230 - protein, 233 aa, Artificial Sequence
  synthetic ZmPYLc homologous to AtPYR1 E141N
MRERNSSIDQEHQRGSSSRSTMPFAASRTSQQQHSRVATNGRAVAVCAGHAGVPDEVARHHEHAVAAGQCCAAMVQSIAAPVDAVWSLVRRFDQPQRYKRFIRSCHLVDGDGAEVGSVRELLLVSGLPAESSRERLEIRDDERRVISFRVLGGDHRLANYRSVTTVHEAAPSQDGRPLTMVVNSYVVDVPPGNTVEETRIFVDTIVRCNLQSLEGTVIRQLEIAAMPHDDNQN

SEQ ID NO: 231 - protein, 213 aa, Artificial Sequence
  synthetic ZmPYLl homologous to AtPYR1 E141N
MPYAATRTSPQQHSRVASNGRAVAACAGHAGVPDEVARHHEHAVAAGQCCSVMVQSIAAPADAVWSLVRRFDQPQGYKRFIRSCHLVDGDGVEVGSVRELLVVSGLPAENSRERLEIRDDERRVISFRILGGDHRLANYRSVTTVHEAASEGGPLTMVVNSYVVDVPPGNTVEETRIFVDTIVRCNLQSLEDTVIRQQAMAAPAAPHNDHNHS

SEQ ID NO: 232 - protein, 200 aa, Artificial Sequence
  synthetic ZmPYLa homologous to AtPYR1 E141N
MPYTAPRPSPQQHSRVLSGGGAKAASHGASCAAVPAEVARHHEHAARAGQCCSAVVQAIAAPVGAVWSVVRRFDRPQAYKHFIRSCRLVGGGDVAVGSVREVRVVSGLPATSSRERLEILDDERRVLSFRVVGGEHRLANYRSVTTVHEAGAGAGTGTVVVNSYVVDVPHGNTADETRVFVDTIVRCNLQSLARTAERLA

SEQ ID NO: 233 - protein, 220 aa, Artificial Sequence
  synthetic ZmPYLb homologous to AtPYR1 E141N
MPCIQASSPGGMPHQHGRGRVLGGGVGCAAEVAAAVAASAGGMRCGAHDGEVPAEAARHHEHAAAGPGRCCSAVVQHVAAPAAAVWSVVRRFDQPQVYKRFVRSCALLAGDGGVGTLREVRVVSGLPAASSRERLEVLDDESHVLSFRVVGGEHRLRNYLSVTTVHPSPAAPDAATVVVNSYVVDVPPGNTPEDTRVFVDTIVKCNLQSLATTAEKLAAV

SEQ ID NO: 234 - protein, 218 aa, Artificial Sequence
  synthetic ZmPYLo homologous to AtPYR1 E141N
MPCLQASSPGSMPYQHHGRGVGCAAEAGAAVGASAGTGTRCGAHDGEVPAEAARHHEHAAPGPGRCCSAVVQRVAAPAEAVWSVVRRFDQPQAYKRFVRSCALLAGDGGVGTLREVRVVSGLPAASSRERLEVLDDESHVLSFRVVGGEHRLQNYLSVTTVHPSPAAPDAATVVVNSYVVDVPPGNTPEDTRVFVDTIVKCNLQSLATTAEKLALAAV

SEQ ID NO: 235 - protein, 212 aa, Artificial Sequence
  synthetic ZmPYLi homologous to AtPYR1 E141N
MDQQGAGGDAEVPAGLGLTAAEYEQLRSTVDAHHRYAVGEGQCSSLLAQRIHAPPEAVWAVVRRFDCPQVYKHFIRSCALRPDPEAGDALCPGRLREVSVISGLPASTSTERLDLLDDAARVFGFSITGGEHRLRNYRSVTTVSELADPAICTVVLNSYVVDVPDGNTEDDTRLFADTVIRLNLQKLKSVAEANAAEAAATTNSVLLPRPAE

SEQ ID NO: 236 - protein, 205 aa, Artificial Sequence
  synthetic ZmPYLk homologous to AtPYR1 E141N
MDQQGAGGDVEVPAGLGLTAAEYEQLRPTVDAHHRYAVGEGQCSSLLAQRIHAPPAAVWAIVRRFDCPQVYKHFIRSCAVRPDPDAGDALRPGRLREVCVISGLPASTSTERLDHLDDAARVFGFSITGGEHRLRNYRSVTTVSELAGPGICTVVLNSYAVDVPDGNTEDDTRLFADTVIRLNLQKLKSVAEASTSSSAPPPPSE

SEQ ID NO: 237 - protein, 188 aa, Artificial Sequence
  synthetic ZmPYLj homologous to AtPYR1 E141N
MEPHMESALRQGLSEAEQRELEGVVRAHHTFPGRAPGTCTSLVTQRVDAPLAAVWPIVRGFGSPQRYKHFIKSCDLKAGDGATVGSVREVTVVSGLPASTSTERLEILDDHRHILSFRVVGGDHRLRNYRSVTSVTEFQPGPYCVVLNSYVVDVPDGNTEEDTRMFTDTVVKLNLQKLAAIATSSSAN

SEQ ID NO: 238 - protein, 214 aa, Artificial Sequence
  synthetic ZmPYLd homologous to AtPYR1 E141N
MVVEMDGGVGVAAAGGGGAQTPAPPPPRRWRLADERCDLRAMETDYVRRFHRHEPRDHQCSSAVAKHIKAPVHLVWSLVRRFDQPQLFKPFVSRCEMKGNIEIGSVREVNVKSGLPATRSTERLELLDDDERILSVRFVGGDHRLQNYSSILSVTEFQPGPYCVVLNSYVVDVPDGNTEEDTRMFTDTVVKLNLQKLAAIATSSSANQTEPLDR

SEQ ID NO: 239 - protein, 209 aa, Artificial Sequence
  synthetic ZmPYLf homologous to AtPYR1 E141N
MVMVEMDGGVGGGGGGGQTPAPRRWRLADERCDLRAMETDYVRRFHRHEPREHQCSSAVAKHIKAPVHLVWSLVRRFDQPQLFKPFVSRCEMKGNIEIGSVREVNVKSGLPATRSTERLELLDDNEHILSVRFVGGDHRLQNYSSILSVTEFQPGPYCVVLNSYVVDVPDGNTEEDTRMFTDTVVKLNLQKLAAIATSSSANQTEPLDR

SEQ ID NO: 240 - protein, 197 aa, Artificial Sequence
  synthetic ZmPYLe homologous to AtPYR1 E141N
MVGLVGGSTARAEHVVANAGGEAEYVRRMHRHAPTEHQCTSTLVKHIKAPVHLVWELVRRFDQPQRYKPFVRNCVVRGDQLEVGSLRDVNVKTGLPATTSTERLEQLDDDLHILGVKFVGGDHRLQNYSSIITVHPESIDGRPGTLVINSFVVDVPDGNTKDETCYFVEAVIKCNLNSLAEVSEQLAVESPTSLIDQ

SEQ ID NO: 241 - protein, 197 aa, Artificial Sequence
  synthetic ZmPYLg homologous to AtPYR1 E141N
MVGLVGGSTARAEHVVANAGGETEYVRRLHRHAPAEHQCTSTLVKHIKAPVHLVWELVRSFDQPQRYKPFVRNCVVRGDQLEVGSLRDVNVKTGLPATTSTERLEQLDDDLHILGVKFVGGDHRLQNYSSIITVHPESIDGRPGTLVINSFVVDVPDGNTKDETCYFVEAVIKCNLKSLAEVSEQLAVESPTSPIDQ

SEQ ID NO: 242 - protein, 233 aa, Artificial Sequence
  synthetic ZmPYLc homologous to AtPYR1 E141T
MRERNSSIDQEHQRGSSSRSTMPFAASRTSQQQHSRVATNGRAVAVCAGHAGVPDEVARHHEHAVAAGQCCAAMVQSIAAPVDAVWSLVRRFDQPQRYKRFIRSCHLVDGDGAEVGSVRELLLVSGLPAESSRERLEIRDDERRVISFRVLGGDHRLANYRSVTTVHEAAPSQDGRPLTMVVTSYVVDVPPGNTVEETRIFVDTIVRCNLQSLEGTVIRQLEIAAMPHDDNQN

SEQ ID NO: 243 - protein, 213 aa, Artificial Sequence
  synthetic ZmPYLl homologous to AtPYR1 E141T
MPYAATRTSPQQHSRVASNGRAVAACAGHAGVPDEVARHHEHAVAAGQCCSVMVQSIAAPADAVWSLVRRFDQPQGYKRFIRSCHLVDGDGVEVGSVRELLVVSGLPAENSRERLEIRDDERRVISFRILGGDHRLANYRSVTTVHEAASEGGPLTMVVTSYVVDVPPGNTVEETRIFVDTIVRCNLQSLEDTVIRQQAMAAPAAPHNDHNHS

SEQ ID NO: 244 - protein, 200 aa, Artificial Sequence
  synthetic ZmPYLa homologous to AtPYR1 E141T
MPYTAPRPSPQQHSRVLSGGGAKAASHGASCAAVPAEVARHHEHAARAGQCCSAVVQAIAAPVGAVWSVVRRFDRPQAYKHFIRSCRLVGGGDVAVGSVREVRVVSGLPATSSRERLEILDDERRVLSFRVVGGEHRLANYRSVTTVHEAGAGAGTGTVVVTSYVVDVPHGNTADETRVFVDTIVRCNLQSLARTAERLA

SEQ ID NO: 245 - protein, 220 aa, Artificial Sequence
  synthetic ZmPYLb homologous to AtPYR1 E141T
MPCIQASSPGGMPHQHGRGRVLGGGVGCAAEVAAAVAASAGGMRCGAHDGEVPAEAARHHEHAAAGPGRCCSAVVQHVAAPAAAVWSVVRRFDQPQVYKRFVRSCALLAGDGGVGTLREVRVVSGLPAASSRERLEVLDDESHVLSFRVVGGEHRLRNYLSVTTVHPSPAAPDAATVVVTSYVVDVPPGNTPEDTRVFVDTIVKCNLQSLATTAEKLAAV

SEQ ID NO: 246 - protein, 218 aa, Artificial Sequence
  synthetic ZmPYLo homologous to AtPYR1 E141T
MPCLQASSPGSMPYQHHGRGVGCAAEAGAAVGASAGTGTRCGAHDGEVPAEAARHHEHAAPGPGRCCSAVVQRVAAPAEAVWSVVRRFDQPQAYKRFVRSCALLAGDGGVGTLREVRVVSGLPAASSRERLEVLDDESHVLSFRVVGGEHRLQNYLSVTTVHPSPAAPDAATVVVTSYVVDVPPGNTPEDTRVFVDTIVKCNLQSLATTAEKLALAAV

SEQ ID NO: 247 - protein, 212 aa, Artificial Sequence
  synthetic ZmPYLi homologous to AtPYR1 E141T
MDQQGAGGDAEVPAGLGLTAAEYEQLRSTVDAHHRYAVGEGQCSSLLAQRIHAPPEAVWAVVRRFDCPQVYKHFIRSCALRPDPEAGDALCPGRLREVSVISGLPASTSTERLDLLDDAARVFGFSITGGEHRLRNYRSVTTVSELADPAICTVVLTSYVVDVPDGNTEDDTRLFADTVIRLNLQKLKSVAEANAAEAAATTNSVLLPRPAE

SEQ ID NO: 248 - protein, 205 aa, Artificial Sequence
  synthetic ZmPYLk homologous to AtPYR1 E141T
MDQQGAGGDVEVPAGLGLTAAEYEQLRPTVDAHHRYAVGEGQCSSLLAQRIHAPPAAVWAIVRRFDCPQVYKHFIRSCAVRPDPDAGDALRPGRLREVCVISGLPASTSTERLDHLDDAARVFGFSITGGEHRLRNYRSVTTVSELAGPGICTVVLTSYAVDVPDGNTEDDTRLFADTVIRLNLQKLKSVAEASTSSSAPPPPSE

SEQ ID NO: 249 - protein, 188 aa, Artificial Sequence
  synthetic ZmPYLj homologous to AtPYR1 E141T
MEPHMESALRQGLSEAEQRELEGVVRAHHTFPGRAPGTCTSLVTQRVDAPLAAVWPIVRGFGSPQRYKHFIKSCDLKAGDGATVGSVREVTVVSGLPASTSTERLEILDDHRHILSFRVVGGDHRLRNYRSVTSVTEFQPGPYCVVLTSYVVDVPDGNTEEDTRMFTDTVVKLNLQKLAAIATSSSAN

SEQ ID NO: 250 - protein, 214 aa, Artificial Sequence
  synthetic ZmPYLd homologous to AtPYR1 E141T
MVVEMDGGVGVAAAGGGGAQTPAPPPPRRWRLADERCDLRAMETDYVRRFHRHEPRDHQCSSAVAKHIKAPVHLVWSLVRRFDQPQLFKPFVSRCEMKGNIEIGSVREVNVKSGLPATRSTERLELLDDDERILSVRFVGGDHRLQNYSSILSVTEFQPGPYCVVLTSYVVDVPDGNTEEDTRMFTDTVVKLNLQKLAAIATSSSANQTEPLDR

SEQ ID NO: 251 - protein, 209 aa, Artificial Sequence
  synthetic ZmPYLf homologous to AtPYR1 E141T
MVMVEMDGGVGGGGGGGQTPAPRRWRLADERCDLRAMETDYVRRFHRHEPREHQCSSAVAKHIKAPVHLVWSLVRRFDQPQLFKPFVSRCEMKGNIEIGSVREVNVKSGLPATRSTERLELLDDNEHILSVRFVGGDHRLQNYSSILSVTEFQPGPYCVVLTSYVVDVPDGNTEEDTRMFTDTVVKLNLQKLAAIATSSSANQTEPLDR

SEQ ID NO: 252 - protein, 197 aa, Artificial Sequence
  synthetic ZmPYLe homologous to AtPYR1 E141T
MVGLVGGSTARAEHVVANAGGEAEYVRRMHRHAPTEHQCTSTLVKHIKAPVHLVWELVRRFDQPQRYKPFVRNCVVRGDQLEVGSLRDVNVKTGLPATTSTERLEQLDDDLHILGVKFVGGDHRLQNYSSIITVHPESIDGRPGTLVITSFVVDVPDGNTKDETCYFVEAVIKCNLNSLAEVSEQLAVESPTSLIDQ

SEQ ID NO: 253 - protein, 197 aa, Artificial Sequence
  synthetic ZmPYLg homologous to AtPYR1 E141T
MVGLVGGSTARAEHVVANAGGETEYVRRLHRHAPAEHQCTSTLVKHIKAPVHLVWELVRSFDQPQRYKPFVRNCVVRGDQLEVGSLRDVNVKTGLPATTSTERLEQLDDDLHILGVKFVGGDHRLQNYSSIITVHPESIDGRPGTLVITSFVVDVPDGNTKDETCYFVEAVIKCNLKSLAEVSEQLAVESPTSPIDQ

SEQ ID NO: 254 - protein, 233 aa, Artificial Sequence
  synthetic ZmPYLc homologous to AtPYR1 E141V
MRERNSSIDQEHQRGSSSRSTMPFAASRTSQQQHSRVATNGRAVAVCAGHAGVPDEVARHHEHAVAAGQCCAAMVQSIAAPVDAVWSLVRRFDQPQRYKRFIRSCHLVDGDGAEVGSVRELLLVSGLPAESSRERLEIRDDERRVISFRVLGGDHRLANYRSVTTVHEAAPSQDGRPLTMVVVSYVVDVPPGNTVEETRIFVDTIVRCNLQSLEGTVIRQLEIAAMPHDDNQN

SEQ ID NO: 255 - protein, 213 aa, Artificial Sequence
  synthetic ZmPYLl homologous to AtPYR1 E141V
MPYAATRTSPQQHSRVASNGRAVAACAGHAGVPDEVARHHEHAVAAGQCCSVMVQSIAAPADAVWSLVRRFDQPQGYKRFIRSCHLVDGDGVEVGSVRELLVVSGLPAENSRERLEIRDDERRVISFRILGGDHRLANYRSVTTVHEAASEGGPLTMVVVSYVVDVPPGNTVEETRIFVDTIVRCNLQSLEDTVIRQQAMAAPAAPHNDHNHS

SEQ ID NO: 256 - protein, 200 aa, Artificial Sequence
  synthetic ZmPYLa homologous to AtPYR1 E141V
MPYTAPRPSPQQHSRVLSGGGAKAASHGASCAAVPAEVARHHEHAARAGQCCSAVVQAIAAPVGAVWSVVRRFDRPQAYKHFIRSCRLVGGGDVAVGSVREVRVVSGLPATSSRERLEILDDERRVLSFRVVGGEHRLANYRSVTTVHEAGAGAGTGTVVVVSYVVDVPHGNTADETRVFVDTIVRCNLQSLARTAERLA

SEQ ID NO: 257 - protein, 220 aa, Artificial Sequence
  synthetic ZmPYLb homologous to AtPYR1 E141V
MPCIQASSPGGMPHQHGRGRVLGGGVGCAAEVAAAVAASAGGMRCGAHDGEVPAEAARHHEHAAAGPGRCCSAVVQHVAAPAAAVWSVVRRFDQPQVYKRFVRSCALLAGDGGVGTLREVRVVSGLPAASSRERLEVLDDESHVLSFRVVGGEHRLRNYLSVTTVHPSPAAPDAATVVVVSYVVDVPPGNTPEDTRVFVDTIVKCNLQSLATTAEKLAAV

SEQ ID NO: 258 - protein, 218 aa, Artificial Sequence
  synthetic ZmPYLo homologous to AtPYR1 E141V
MPCLQASSPGSMPYQHHGRGVGCAAEAGAAVGASAGTGTRCGAHDGEVPAEAARHHEHAAPGPGRCCSAVVQRVAAPAEAVWSVVRRFDQPQAYKRFVRSCALLAGDGGVGTLREVRVVSGLPAASSRERLEVLDDESHVLSFRVVGGEHRLQNYLSVTTVHPSPAAPDAATVVVVSYVVDVPPGNTPEDTRVFVDTIVKCNLQSLATTAEKLALAAV

SEQ ID NO: 259 - protein, 212 aa, Artificial Sequence
  synthetic ZmPYLi homologous to AtPYR1 E141V
MDQQGAGGDAEVPAGLGLTAAEYEQLRSTVDAHHRYAVGEGQCSSLLAQRIHAPPEAVWAVVRRFDCPQVYKHFIRSCALRPDPEAGDALCPGRLREVSVISGLPASTSTERLDLLDDAARVFGFSITGGEHRLRNYRSVTTVSELADPAICTVVLVSYVVDVPDGNTEDDTRLFADTVIRLNLQKLKSVAEANAAEAAATTNSVLLPRPAE

SEQ ID NO: 260 - protein, 205 aa, Artificial Sequence
  synthetic ZmPYLk homologous to AtPYR1 E141V
MDQQGAGGDVEVPAGLGLTAAEYEQLRPTVDAHHRYAVGEGQCSSLLAQRIHAPPAAVWAIVRRFDCPQVYKHFIRSCAVRPDPDAGDALRPGRLREVCVISGLPASTSTERLDHLDDAARVFGFSITGGEHRLRNYRSVTTVSELAGPGICTVVLVSYAVDVPDGNTEDDTRLFADTVIRLNLQKLKSVAEASTSSSAPPPPSE

SEQ ID NO: 261 - protein, 188 aa, Artificial Sequence
  synthetic ZmPYLj homologous to AtPYR1 E141V
MEPHMESALRQGLSEAEQRELEGVVRAHHTFPGRAPGTCTSLVTQRVDAPLAAVWPIVRGFGSPQRYKHFIKSCDLKAGDGATVGSVREVTVVSGLPASTSTERLEILDDHRHILSFRVVGGDHRLRNYRSVTSVTEFQPGPYCVVLVSYVVDVPDGNTEEDTRMFTDTVVKLNLQKLAAIATSSSAN

SEQ ID NO: 262 - protein, 214 aa, Artificial Sequence
  synthetic ZmPYLd homologous to AtPYR1 E141V
MVVEMDGGVGVAAAGGGGAQTPAPPPPRRWRLADERCDLRAMETDYVRRFHRHEPRDHQCSSAVAKHIKAPVHLVWSLVRRFDQPQLFKPFVSRCEMKGNIEIGSVREVNVKSGLPATRSTERLELLDDDERILSVRFVGGDHRLQNYSSILSVTEFQPGPYCVVLVSYVVDVPDGNTEEDTRMFTDTVVKLNLQKLAAIATSSSANQTEPLDR

SEQ ID NO: 263 - protein, 209 aa, Artificial Sequence
  synthetic ZmPYLf homologous to AtPYR1 E141V
MVMVEMDGGVGGGGGGGQTPAPRRWRLADERCDLRAMETDYVRRFHRHEPREHQCSSAVAKHIKAPVHLVWSLVRRFDQPQLFKPFVSRCEMKGNIEIGSVREVNVKSGLPATRSTERLELLDDNEHILSVRFVGGDHRLQNYSSILSVTEFQPGPYCVVLVSYVVDVPDGNTEEDTRMFTDTVVKLNLQKLAAIATSSSANQTEPLDR

SEQ ID NO: 264 - protein, 197 aa, Artificial Sequence
  synthetic ZmPYLe homologous to AtPYR1 E141V
MVGLVGGSTARAEHVVANAGGEAEYVRRMHRHAPTEHQCTSTLVKHIKAPVHLVWELVRRFDQPQRYKPFVRNCVVRGDQLEVGSLRDVNVKTGLPATTSTERLEQLDDDLHILGVKFVGGDHRLQNYSSIITVHPESIDGRPGTLVIVSFVVDVPDGNTKDETCYFVEAVIKCNLNSLAEVSEQLAVESPTSLIDQ

SEQ ID NO: 265 - protein, 197 aa, Artificial Sequence
  synthetic ZmPYLg homologous to AtPYR1 E141V
MVGLVGGSTARAEHVVANAGGETEYVRRLHRHAPAEHQCTSTLVKHIKAPVHLVWELVRSFDQPQRYKPFVRNCVVRGDQLEVGSLRDVNVKTGLPATTSTERLEQLDDDLHILGVKFVGGDHRLQNYSSIITVHPESIDGRPGTLVIVSFVVDVPDGNTKDETCYFVEAVIKCNLKSLAEVSEQLAVESPTSPIDQ

SEQ ID NO: 266 - protein, 233 aa, Artificial Sequence
  synthetic ZmPYLc homologous to AtPYR1 E141W
MRERNSSIDQEHQRGSSSRSTMPFAASRTSQQQHSRVATNGRAVAVCAGHAGVPDEVARHHEHAVAAGQCCAAMVQSIAAPVDAVWSLVRRFDQPQRYKRFIRSCHLVDGDGAEVGSVRELLLVSGLPAESSRERLEIRDDERRVISFRVLGGDHRLANYRSVTTVHEAAPSQDGRPLTMVVWSYVVDVPPGNTVEETRIFVDTIVRCNLQSLEGTVIRQLEIAAMPHDDNQN

SEQ ID NO: 267 - protein, 213 aa, Artificial Sequence
  synthetic ZmPYLl homologous to AtPYR1 E141W
MPYAATRTSPQQHSRVASNGRAVAACAGHAGVPDEVARHHEHAVAAGQCCSVMVQSIAAPADAVWSLVRRFDQPQGYKRFIRSCHLVDGDGVEVGSVRELLVVSGLPAENSRERLEIRDDERRVISFRILGGDHRLANYRSVTTVHEAASEGGPLTMVVWSYVVDVPPGNTVEETRIFVDTIVRCNLQSLEDTVIRQQAMAAPAAPHNDHNHS

SEQ ID NO: 268 - protein, 200 aa, Artificial Sequence
  synthetic ZmPYLa homologous to AtPYR1 E141W
MPYTAPRPSPQQHSRVLSGGGAKAASHGASCAAVPAEVARHHEHAARAGQCCSAVVQAIAAPVGAVWSVVRRFDRPQAYKHFIRSCRLVGGGDVAVGSVREVRVVSGLPATSSRERLEILDDERRVLSFRVVGGEHRLANYRSVTTVHEAGAGAGTGTVVVWSYVVDVPHGNTADETRVFVDTIVRCNLQSLARTAERLA

SEQ ID NO: 269 - protein, 220 aa, Artificial Sequence
  synthetic ZmPYLb homologous to AtPYR1 E141W
MPCIQASSPGGMPHQHGRGRVLGGGVGCAAEVAAAVAASAGGMRCGAHDGEVPAEAARHHEHAAAGPGRCCSAVVQHVAAPAAAVWSVVRRFDQPQVYKRFVRSCALLAGDGGVGTLREVRVVSGLPAASSRERLEVLDDESHVLSFRVVGGEHRLRNYLSVTTVHPSPAAPDAATVVVWSYVVDVPPGNTPEDTRVFVDTIVKCNLQSLATTAEKLAAV

SEQ ID NO: 270 - protein, 218 aa, Artificial Sequence
  synthetic ZmPYLo homologous to AtPYR1 E141W
MPCLQASSPGSMPYQHHGRGVGCAAEAGAAVGASAGTGTRCGAHDGEVPAEAARHHEHAAPGPGRCCSAVVQRVAAPAEAVWSVVRRFDQPQAYKRFVRSCALLAGDGGVGTLREVRVVSGLPAASSRERLEVLDDESHVLSFRVVGGEHRLQNYLSVTTVHPSPAAPDAATVVVWSYVVDVPPGNTPEDTRVFVDTIVKCNLQSLATTAEKLALAAV

SEQ ID NO: 271 - protein, 212 aa, Artificial Sequence
  synthetic ZmPYLi homologous to AtPYR1 E141W
MDQQGAGGDAEVPAGLGLTAAEYEQLRSTVDAHHRYAVGEGQCSSLLAQRIHAPPEAVWAVVRRFDCPQVYKHFIRSCALRPDPEAGDALCPGRLREVSVISGLPASTSTERLDLLDDAARVFGFSITGGEHRLRNYRSVTTVSELADPAICTVVLWSYVVDVPDGNTEDDTRLFADTVIRLNLQKLKSVAEANAAEAAATTNSVLLPRPAE

SEQ ID NO: 272 - protein, 205 aa, Artificial Sequence
  synthetic ZmPYLk homologous to AtPYR1 E141W
MDQQGAGGDVEVPAGLGLTAAEYEQLRPTVDAHHRYAVGEGQCSSLLAQRIHAPPAAVWAIVRRFDCPQVYKHFIRSCAVRPDPDAGDALRPGRLREVCVISGLPASTSTERLDHLDDAARVFGFSITGGEHRLRNYRSVTTVSELAGPGICTVVLWSYAVDVPDGNTEDDTRLFADTVIRLNLQKLKSVAEASTSSSAPPPPSE

SEQ ID NO: 273 - protein, 188 aa, Artificial Sequence
  synthetic ZmPYLj homologous to AtPYR1 E141W
MEPHMESALRQGLSEAEQRELEGVVRAHHTFPGRAPGTCTSLVTQRVDAPLAAVWPIVRGFGSPQRYKHFIKSCDLKAGDGATVGSVREVTVVSGLPASTSTERLEILDDHRHILSFRVVGGDHRLRNYRSVTSVTEFQPGPYCVVLWSYVVDVPDGNTEEDTRMFTDTVVKLNLQKLAAIATSSSAN

SEQ ID NO: 274 - protein, 214 aa, Artificial Sequence
  synthetic ZmPYLd homologous to AtPYR1 E141W
MVVEMDGGVGVAAAGGGGAQTPAPPPPRRWRLADERCDLRAMETDYVRRFHRHEPRDHQCSSAVAKHIKAPVHLVWSLVRRFDQPQLFKPFVSRCEMKGNIEIGSVREVNVKSGLPATRSTERLELLDDDERILSVRFVGGDHRLQNYSSILSVTEFQPGPYCVVLWSYVVDVPDGNTEEDTRMFTDTVVKLNLQKLAAIATSSSANQTEPLDR

SEQ ID NO: 275 - protein, 209 aa, Artificial Sequence
  synthetic ZmPYLf homologous to AtPYR1 E141W
MVMVEMDGGVGGGGGGGQTPAPRRWRLADERCDLRAMETDYVRRFHRHEPREHQCSSAVAKHIKAPVHLVWSLVRRFDQPQLFKPFVSRCEMKGNIEIGSVREVNVKSGLPATRSTERLELLDDNEHILSVRFVGGDHRLQNYSSILSVTEFQPGPYCVVLWSYVVDVPDGNTEEDTRMFTDTVVKLNLQKLAAIATSSSANQTEPLDR

SEQ ID NO: 276 - protein, 197 aa, Artificial Sequence
  synthetic ZmPYLe homologous to AtPYR1 E141W
MVGLVGGSTARAEHVVANAGGEAEYVRRMHRHAPTEHQCTSTLVKHIKAPVHLVWELVRRFDQPQRYKPFVRNCVVRGDQLEVGSLRDVNVKTGLPATTSTERLEQLDDDLHILGVKFVGGDHRLQNYSSIITVHPESIDGRPGTLVIWSFVVDVPDGNTKDETCYFVEAVIKCNLNSLAEVSEQLAVESPTSLIDQ

SEQ ID NO: 277 - protein, 197 aa, Artificial Sequence
  synthetic ZmPYLg homologous to AtPYR1 E141W
MVGLVGGSTARAEHVVANAGGETEYVRRLHRHAPAEHQCTSTLVKHIKAPVHLVWELVRSFDQPQRYKPFVRNCVVRGDQLEVGSLRDVNVKTGLPATTSTERLEQLDDDLHILGVKFVGGDHRLQNYSSIITVHPESIDGRPGTLVIWSFVVDVPDGNTKDETCYFVEAVIKCNLKSLAEVSEQLAVESPTSPIDQ

SEQ ID NO: 278 - protein, 233 aa, Artificial Sequence
  synthetic ZmPYLc homologous to AtPYR1 E141Y
MRERNSSIDQEHQRGSSSRSTMPFAASRTSQQQHSRVATNGRAVAVCAGHAGVPDEVARHHEHAVAAGQCCAAMVQSIAAPVDAVWSLVRRFDQPQRYKRFIRSCHLVDGDGAEVGSVRELLLVSGLPAESSRERLEIRDDERRVISFRVLGGDHRLANYRSVTTVHEAAPSQDGRPLTMVVYSYVVDVPPGNTVEETRIFVDTIVRCNLQSLEGTVIRQLEIAAMPHDDNQN

SEQ ID NO: 279 - protein, 213 aa, Artificial Sequence
  synthetic ZmPYLl homologous to AtPYR1 E141Y
MPYAATRTSPQQHSRVASNGRAVAACAGHAGVPDEVARHHEHAVAAGQCCSVMVQSIAAPADAVWSLVRRFDQPQGYKRFIRSCHLVDGDGVEVGSVRELLVVSGLPAENSRERLEIRDDERRVISFRILGGDHRLANYRSVTTVHEAASEGGPLTMVVYSYVVDVPPGNTVEETRIFVDTIVRCNLQSLEDTVIRQQAMAAPAAPHNDHNHS

SEQ ID NO: 280 - protein, 200 aa, Artificial Sequence
  synthetic ZmPYLa homologous to AtPYR1 E141Y
MPYTAPRPSPQQHSRVLSGGGAKAASHGASCAAVPAEVARHHEHAARAGQCCSAVVQAIAAPVGAVWSVVRRFDRPQAYKHFIRSCRLVGGGDVAVGSVREVRVVSGLPATSSRERLEILDDERRVLSFRVVGGEHRLANYRSVTTVHEAGAGAGTGTVVVYSYVVDVPHGNTADETRVFVDTIVRCNLQSLARTAERLA

SEQ ID NO: 281 - protein, 220 aa, Artificial Sequence
  synthetic ZmPYLb homologous to AtPYR1 E141Y
MPCIQASSPGGMPHQHGRGRVLGGGVGCAAEVAAAVAASAGGMRCGAHDGEVPAEAARHHEHAAAGPGRCCSAVVQHVAAPAAAVWSVVRRFDQPQVYKRFVRSCALLAGDGGVGTLREVRVVSGLPAASSRERLEVLDDESHVLSFRVVGGEHRLRNYLSVTTVHPSPAAPDAATVVVYSYVVDVPPGNTPEDTRVFVDTIVKCNLQSLATTAEKLAAV

SEQ ID NO: 282 - protein, 218 aa, Artificial Sequence
  synthetic ZmPYLo homologous to AtPYR1 E141Y
MPCLQASSPGSMPYQHHGRGVGCAAEAGAAVGASAGTGTRCGAHDGEVPAEAARHHEHAAPGPGRCCSAVVQRVAAPAEAVWSVVRRFDQPQAYKRFVRSCALLAGDGGVGTLREVRVVSGLPAASSRERLEVLDDESHVLSFRVVGGEHRLQNYLSVTTVHPSPAAPDAATVVVYSYVVDVPPGNTPEDTRVFVDTIVKCNLQSLATTAEKLALAAV

SEQ ID NO: 283 - protein, 212 aa, Artificial Sequence
  synthetic ZmPYLi homologous to AtPYR1 E141Y
MDQQGAGGDAEVPAGLGLTAAEYEQLRSTVDAHHRYAVGEGQCSSLLAQRIHAPPEAVWAVVRRFDCPQVYKHFIRSCALRPDPEAGDALCPGRLREVSVISGLPASTSTERLDLLDDAARVFGFSITGGEHRLRNYRSVTTVSELADPAICTVVLYSYVVDVPDGNTEDDTRLFADTVIRLNLQKLKSVAEANAAEAAATTNSVLLPRPAE

SEQ ID NO: 284 - protein, 205 aa, Artificial Sequence
  synthetic ZmPYLk homologous to AtPYR1 E141Y
MDQQGAGGDVEVPAGLGLTAAEYEQLRPTVDAHHRYAVGEGQCSSLLAQRIHAPPAAVWAIVRRFDCPQVYKHFIRSCAVRPDPDAGDALRPGRLREVCVISGLPASTSTERLDHLDDAARVFGFSITGGEHRLRNYRSVTTVSELAGPGICTVVLYSYAVDVPDGNTEDDTRLFADTVIRLNLQKLKSVAEASTSSSAPPPPSE

SEQ ID NO: 285 - protein, 188 aa, Artificial Sequence
  synthetic ZmPYLj homologous to AtPYR1 E141Y
MEPHMESALRQGLSEAEQRELEGVVRAHHTFPGRAPGTCTSLVTQRVDAPLAAVWPIVRGFGSPQRYKHFIKSCDLKAGDGATVGSVREVTVVSGLPASTSTERLEILDDHRHILSFRVVGGDHRLRNYRSVTSVTEFQPGPYCVVLYSYVVDVPDGNTEEDTRMFTDTVVKLNLQKLAAIATSSSAN

SEQ ID NO: 286 - protein, 214 aa, Artificial Sequence
  synthetic ZmPYLd homologous to AtPYR1 E141Y
MVVEMDGGVGVAAAGGGGAQTPAPPPPRRWRLADERCDLRAMETDYVRRFHRHEPRDHQCSSAVAKHIKAPVHLVWSLVRRFDQPQLFKPFVSRCEMKGNIEIGSVREVNVKSGLPATRSTERLELLDDDERILSVRFVGGDHRLQNYSSILSVTEFQPGPYCVVLYSYVVDVPDGNTEEDTRMFTDTVVKLNLQKLAAIATSSSANQTEPLDR

SEQ ID NO: 287 - protein, 209 aa, Artificial Sequence
  synthetic ZmPYLf homologous to AtPYR1 E141Y
MVMVEMDGGVGGGGGGGQTPAPRRWRLADERCDLRAMETDYVRRFHRHEPREHQCSSAVAKHIKAPVHLVWSLVRRFDQPQLFKPFVSRCEMKGNIEIGSVREVNVKSGLPATRSTERLELLDDNEHILSVRFVGGDHRLQNYSSILSVTEFQPGPYCVVLYSYVVDVPDGNTEEDTRMFTDTVVKLNLQKLAAIATSSSANQTEPLDR

SEQ ID NO: 288 - protein, 197 aa, Artificial Sequence
  synthetic ZmPYLe homologous to AtPYR1 E141Y
MVGLVGGSTARAEHVVANAGGEAEYVRRMHRHAPTEHQCTSTLVKHIKAPVHLVWELVRRFDQPQRYKPFVRNCVVRGDQLEVGSLRDVNVKTGLPATTSTERLEQLDDDLHILGVKFVGGDHRLQNYSSIITVHPESIDGRPGTLVIYSFVVDVPDGNTKDETCYFVEAVIKCNLNSLAEVSEQLAVESPTSLIDQ

SEQ ID NO: 289 - protein, 197 aa, Artificial Sequence
  synthetic ZmPYLg homologous to AtPYR1 E141Y
MVGLVGGSTARAEHVVANAGGETEYVRRLHRHAPAEHQCTSTLVKHIKAPVHLVWELVRSFDQPQRYKPFVRNCVVRGDQLEVGSLRDVNVKTGLPATTSTERLEQLDDDLHILGVKFVGGDHRLQNYSSIITVHPESIDGRPGTLVIYSFVVDVPDGNTKDETCYFVEAVIKCNLKSLAEVSEQLAVESPTSPIDQ

SEQ ID NO: 290 - protein, 233 aa, Artificial Sequence
  synthetic ZmPYLc homologous to AtPYR1 F61L
MRERNSSIDQEHQRGSSSRSTMPFAASRTSQQQHSRVATNGRAVAVCAGHAGVPDEVARHHEHAVAAGQCCAAMVQSIAAPVDAVWSLVRRFDQPQRYKRLIRSCHLVDGDGAEVGSVRELLLVSGLPAESSRERLEIRDDERRVISFRVLGGDHRLANYRSVTTVHEAAPSQDGRPLTMVVESYVVDVPPGNTVEETRIFVDTIVRCNLQSLEGTVIRQLEIAAMPHDDNQN

SEQ ID NO: 291 - protein, 213 aa, Artificial Sequence
  synthetic ZmPYLl homologous to AtPYR1 F61L
MPYAATRTSPQQHSRVASNGRAVAACAGHAGVPDEVARHHEHAVAAGQCCSVMVQSIAAPADAVWSLVRRFDQPQGYKRLIRSCHLVDGDGVEVGSVRELLVVSGLPAENSRERLEIRDDERRVISFRILGGDHRLANYRSVTTVHEAASEGGPLTMVVESYVVDVPPGNTVEETRIFVDTIVRCNLQSLEDTVIRQQAMAAPAAPHNDHNHS

SEQ ID NO: 292 - protein, 200 aa, Artificial Sequence
  synthetic ZmPYLa homologous to AtPYR1 F61L
MPYTAPRPSPQQHSRVLSGGGAKAASHGASCAAVPAEVARHHEHAARAGQCCSAVVQAIAAPVGAVWSVVRRFDRPQAYKHLIRSCRLVGGGDVAVGSVREVRVVSGLPATSSRERLEILDDERRVLSFRVVGGEHRLANYRSVTTVHEAGAGAGTGTVVVESYVVDVPHGNTADETRVFVDTIVRCNLQSLARTAERLA

SEQ ID NO: 293 - protein, 220 aa, Artificial Sequence
  synthetic ZmPYLb homologous to AtPYR1 F61L
MPCIQASSPGGMPHQHGRGRVLGGGVGCAAEVAAAVAASAGGMRCGAHDGEVPAEAARHHEHAAAGPGRCCSAVVQHVAAPAAAVWSVVRRFDQPQVYKRLVRSCALLAGDGGVGTLREVRVVSGLPAASSRERLEVLDDESHVLSFRVVGGEHRLRNYLSVTTVHPSPAAPDAATVVVESYVVDVPPGNTPEDTRVFVDTIVKCNLQSLATTAEKLAAV

SEQ ID NO: 294 - protein, 218 aa, Artificial Sequence
  synthetic ZmPYLo homologous to AtPYR1 F61L
MPCLQASSPGSMPYQHHGRGVGCAAEAGAAVGASAGTGTRCGAHDGEVPAEAARHHEHAAPGPGRCCSAVVQRVAAPAEAVWSVVRRFDQPQAYKRLVRSCALLAGDGGVGTLREVRVVSGLPAASSRERLEVLDDESHVLSFRVVGGEHRLQNYLSVTTVHPSPAAPDAATVVVESYVVDVPPGNTPEDTRVFVDTIVKCNLQSLATTAEKLALAAV

SEQ ID NO: 295 - protein, 212 aa, Artificial Sequence
  synthetic ZmPYLi homologous to AtPYR1 F61L
MDQQGAGGDAEVPAGLGLTAAEYEQLRSTVDAHHRYAVGEGQCSSLLAQRIHAPPEAVWAVVRRFDCPQVYKHLIRSCALRPDPEAGDALCPGRLREVSVISGLPASTSTERLDLLDDAARVFGFSITGGEHRLRNYRSVTTVSELADPAICTVVLESYVVDVPDGNTEDDTRLFADTVIRLNLQKLKSVAEANAAEAAATTNSVLLPRPAE

SEQ ID NO: 296 - protein, 205 aa, Artificial Sequence
  synthetic ZmPYLk homologous to AtPYR1 F61L
MDQQGAGGDVEVPAGLGLTAAEYEQLRPTVDAHHRYAVGEGQCSSLLAQRIHAPPAAVWAIVRRFDCPQVYKHLIRSCAVRPDPDAGDALRPGRLREVCVISGLPASTSTERLDHLDDAARVFGFSITGGEHRLRNYRSVTTVSELAGPGICTVVLESYAVDVPDGNTEDDTRLFADTVIRLNLQKLKSVAEASTSSSAPPPPSE

SEQ ID NO: 297 - protein, 188 aa, Artificial Sequence
  synthetic ZmPYLj homologous to AtPYR1 F61L
MEPHMESALRQGLSEAEQRELEGVVRAHHTFPGRAPGTCTSLVTQRVDAPLAAVWPIVRGFGSPQRYKHLIKSCDLKAGDGATVGSVREVTVVSGLPASTSTERLEILDDHRHILSFRVVGGDHRLRNYRSVTSVTEFQPGPYCVVLESYVVDVPDGNTEEDTRMFTDTVVKLNLQKLAAIATSSSAN

SEQ ID NO: 298 - protein, 214 aa, Artificial Sequence
  synthetic ZmPYLd homologous to AtPYR1 F61L
MVVEMDGGVGVAAAGGGGAQTPAPPPPRRWRLADERCDLRAMETDYVRRFHRHEPRDHQCSSAVAKHIKAPVHLVWSLVRRFDQPQLFKPLVSRCEMKGNIEIGSVREVNVKSGLPATRSTERLELLDDDERILSVRFVGGDHRLQNYSSILSVTEFQPGPYCVVLESYVVDVPDGNTEEDTRMFTDTVVKLNLQKLAAIATSSSANQTEPLDR

SEQ ID NO: 299 - protein, 209 aa, Artificial Sequence
  synthetic ZmPYLf homologous to AtPYR1 F61L
MVMVEMDGGVGGGGGGGQTPAPRRWRLADERCDLRAMETDYVRRFHRHEPREHQCSSAVAKHIKAPVHLVWSLVRRFDQPQLFKPLVSRCEMKGNIEIGSVREVNVKSGLPATRSTERLELLDDNEHILSVRFVGGDHRLQNYSSILSVTEFQPGPYCVVLESYVVDVPDGNTEEDTRMFTDTVVKLNLQKLAAIATSSSANQTEPLDR

SEQ ID NO: 300 - protein, 197 aa, Artificial Sequence
  synthetic ZmPYLe homologous to AtPYR1 F61L
MVGLVGGSTARAEHVVANAGGEAEYVRRMHRHAPTEHQCTSTLVKHIKAPVHLVWELVRRFDQPQRYKPLVRNCVVRGDQLEVGSLRDVNVKTGLPATTSTERLEQLDDDLHILGVKFVGGDHRLQNYSSIITVHPESIDGRPGTLVIESFVVDVPDGNTKDETCYFVEAVIKCNLNSLAEVSEQLAVESPTSLIDQ

SEQ ID NO: 301 - protein, 197 aa, Artificial Sequence
  synthetic ZmPYLg homologous to AtPYR1 F61L
MVGLVGGSTARAEHVVANAGGETEYVRRLHRHAPAEHQCTSTLVKHIKAPVHLVWELVRSFDQPQRYKPLVRNCVVRGDQLEVGSLRDVNVKTGLPATTSTERLEQLDDDLHILGVKFVGGDHRLQNYSSIITVHPESIDGRPGTLVIESFVVDVPDGNTKDETCYFVEAVIKCNLKSLAEVSEQLAVESPTSPIDQ

SEQ ID NO: 302 - protein, 233 aa, Artificial Sequence
  synthetic ZmPYLc homologous to AtPYR1 F61M
MRERNSSIDQEHQRGSSSRSTMPFAASRTSQQQHSRVATNGRAVAVCAGHAGVPDEVARHHEHAVAAGQCCAAMVQSIAAPVDAVWSLVRRFDQPQRYKRMIRSCHLVDGDGAEVGSVRELLLVSGLPAESSRERLEIRDDERRVISFRVLGGDHRLANYRSVTTVHEAAPSQDGRPLTMVVESYVVDVPPGNTVEETRIFVDTIVRCNLQSLEGTVIRQLEIAAMPHDDNQN

SEQ ID NO: 303 - protein, 213 aa, Artificial Sequence
  synthetic ZmPYLl homologous to AtPYR1 F61M
MPYAATRTSPQQHSRVASNGRAVAACAGHAGVPDEVARHHEHAVAAGQCCSVMVQSIAAPADAVWSLVRRFDQPQGYKRMIRSCHLVDGDGVEVGSVRELLVVSGLPAENSRERLEIRDDERRVISFRILGGDHRLANYRSVTTVHEAASEGGPLTMVVESYVVDVPPGNTVEETRIFVDTIVRCNLQSLEDTVIRQQAMAAPAAPHNDHNHS

SEQ ID NO: 304 - protein, 200 aa, Artificial Sequence
  synthetic ZmPYLa homologous to AtPYR1 F61M
MPYTAPRPSPQQHSRVLSGGGAKAASHGASCAAVPAEVARHHEHAARAGQCCSAVVQAIAAPVGAVWSVVRRFDRPQAYKHMIRSCRLVGGGDVAVGSVREVRVVSGLPATSSRERLEILDDERRVLSFRVVGGEHRLANYRSVTTVHEAGAGAGTGTVVVESYVVDVPHGNTADETRVFVDTIVRCNLQSLARTAERLA

SEQ ID NO: 305 - protein, 220 aa, Artificial Sequence
  synthetic ZmPYLb homologous to AtPYR1 F61M
MPCIQASSPGGMPHQHGRGRVLGGGVGCAAEVAAAVAASAGGMRCGAHDGEVPAEAARHHEHAAAGPGRCCSAVVQHVAAPAAAVWSVVRRFDQPQVYKRMVRSCALLAGDGGVGTLREVRVVSGLPAASSRERLEVLDDESHVLSFRVVGGEHRLRNYLSVTTVHPSPAAPDAATVVVESYVVDVPPGNTPEDTRVFVDTIVKCNLQSLATTAEKLAAV

SEQ ID NO: 306 - protein, 218 aa, Artificial Sequence
  synthetic ZmPYLo homologous to AtPYR1 F61M
MPCLQASSPGSMPYQHHGRGVGCAAEAGAAVGASAGTGTRCGAHDGEVPAEAARHHEHAAPGPGRCCSAVVQRVAAPAEAVWSVVRRFDQPQAYKRMVRSCALLAGDGGVGTLREVRVVSGLPAASSRERLEVLDDESHVLSFRVVGGEHRLQNYLSVTTVHPSPAAPDAATVVVESYVVDVPPGNTPEDTRVFVDTIVKCNLQSLATTAEKLALAAV

SEQ ID NO: 307 - protein, 212 aa, Artificial Sequence
  synthetic ZmPYLi homologous to AtPYR1 F61M
MDQQGAGGDAEVPAGLGLTAAEYEQLRSTVDAHHRYAVGEGQCSSLLAQRIHAPPEAVWAVVRRFDCPQVYKHMIRSCALRPDPEAGDALCPGRLREVSVISGLPASTSTERLDLLDDAARVFGFSITGGEHRLRNYRSVTTVSELADPAICTVVLESYVVDVPDGNTEDDTRLFADTVIRLNLQKLKSVAEANAAEAAATTNSVLLPRPAE

SEQ ID NO: 308 - protein, 205 aa, Artificial Sequence
  synthetic ZmPYLk homologous to AtPYR1 F61M
MDQQGAGGDVEVPAGLGLTAAEYEQLRPTVDAHHRYAVGEGQCSSLLAQRIHAPPAAVWAIVRRFDCPQVYKHMIRSCAVRPDPDAGDALRPGRLREVCVISGLPASTSTERLDHLDDAARVFGFSITGGEHRLRNYRSVTTVSELAGPGICTVVLESYAVDVPDGNTEDDTRLFADTVIRLNLQKLKSVAEASTSSSAPPPPSE

SEQ ID NO: 309 - protein, 188 aa, Artificial Sequence
  synthetic ZmPYLj homologous to AtPYR1 F61M
MEPHMESALRQGLSEAEQRELEGVVRAHHTFPGRAPGTCTSLVTQRVDAPLAAVWPIVRGFGSPQRYKHMIKSCDLKAGDGATVGSVREVTVVSGLPASTSTERLEILDDHRHILSFRVVGGDHRLRNYRSVTSVTEFQPGPYCVVLESYVVDVPDGNTEEDTRMFTDTVVKLNLQKLAAIATSSSAN

SEQ ID NO: 310 - protein, 214 aa, Artificial Sequence
  synthetic ZmPYLd homologous to AtPYR1 F61M
MVVEMDGGVGVAAAGGGGAQTPAPPPPRRWRLADERCDLRAMETDYVRRFHRHEPRDHQCSSAVAKHIKAPVHLVWSLVRRFDQPQLFKPMVSRCEMKGNIEIGSVREVNVKSGLPATRSTERLELLDDDERILSVRFVGGDHRLQNYSSILSVTEFQPGPYCVVLESYVVDVPDGNTEEDTRMFTDTVVKLNLQKLAAIATSSSANQTEPLDR

SEQ ID NO: 311 - protein, 209 aa, Artificial Sequence
  synthetic ZmPYLf homologous to AtPYR1 F61M
MVMVEMDGGVGGGGGGGQTPAPRRWRLADERCDLRAMETDYVRRFHRHEPREHQCSSAVAKHIKAPVHLVWSLVRRFDQPQLFKPMVSRCEMKGNIEIGSVREVNVKSGLPATRSTERLELLDDNEHILSVRFVGGDHRLQNYSSILSVTEFQPGPYCVVLESYVVDVPDGNTEEDTRMFTDTVVKLNLQKLAAIATSSSANQTEPLDR

SEQ ID NO: 312 - protein, 197 aa, Artificial Sequence
  synthetic ZmPYLe homologous to AtPYR1 F61M
MVGLVGGSTARAEHVVANAGGEAEYVRRMHRHAPTEHQCTSTLVKHIKAPVHLVWELVRRFDQPQRYKPMVRNCVVRGDQLEVGSLRDVNVKTGLPATTSTERLEQLDDDLHILGVKFVGGDHRLQNYSSIITVHPESIDGRPGTLVIESFVVDVPDGNTKDETCYFVEAVIKCNLNSLAEVSEQLAVESPTSLIDQ

SEQ ID NO: 313 - protein, 197 aa, Artificial Sequence
  synthetic ZmPYLg homologous to AtPYR1 F61M
MVGLVGGSTARAEHVVANAGGETEYVRRLHRHAPAEHQCTSTLVKHIKAPVHLVWELVRSFDQPQRYKPMVRNCVVRGDQLEVGSLRDVNVKTGLPATTSTERLEQLDDDLHILGVKFVGGDHRLQNYSSIITVHPESIDGRPGTLVIESFVVDVPDGNTKDETCYFVEAVIKCNLKSLAEVSEQLAVESPTSPIDQ

SEQ ID NO: 314 - protein, 233 aa, Artificial Sequence
  synthetic ZmPYLc homologous to AtPYR1 I110C
MRERNSSIDQEHQRGSSSRSTMPFAASRTSQQQHSRVATNGRAVAVCAGHAGVPDEVARHHEHAVAAGQCCAAMVQSIAAPVDAVWSLVRRFDQPQRYKRFIRSCHLVDGDGAEVGSVRELLLVSGLPAESSRERLEIRDDERRVISFRCLGGDHRLANYRSVTTVHEAAPSQDGRPLTMVVESYVVDVPPGNTVEETRIFVDTIVRCNLQSLEGTVIRQLEIAAMPHDDNQN

SEQ ID NO: 315 - protein, 213 aa, Artificial Sequence
  synthetic ZmPYLl homologous to AtPYR1 I110C
MPYAATRTSPQQHSRVASNGRAVAACAGHAGVPDEVARHHEHAVAAGQCCSVMVQSIAAPADAVWSLVRRFDQPQGYKRFIRSCHLVDGDGVEVGSVRELLVVSGLPAENSRERLEIRDDERRVISFRCLGGDHRLANYRSVTTVHEAASEGGPLTMVVESYVVDVPPGNTVEETRIFVDTIVRCNLQSLEDTVIRQQAMAAPAAPHNDHNHS

SEQ ID NO: 316 - protein, 200 aa, Artificial Sequence
  synthetic ZmPYLa homologous to AtPYR1 I110C
MPYTAPRPSPQQHSRVLSGGGAKAASHGASCAAVPAEVARHHEHAARAGQCCSAVVQAIAAPVGAVWSVVRRFDRPQAYKHFIRSCRLVGGGDVAVGSVREVRVVSGLPATSSRERLEILDDERRVLSFRCVGGEHRLANYRSVTTVHEAGAGAGTGTVVVESYVVDVPHGNTADETRVFVDTIVRCNLQSLARTAERLA

SEQ ID NO: 317 - protein, 220 aa, Artificial Sequence
  synthetic ZmPYLb homologous to AtPYR1 I110C
MPCIQASSPGGMPHQHGRGRVLGGGVGCAAEVAAAVAASAGGMRCGAHDGEVPAEAARHHEHAAAGPGRCCSAVVQHVAAPAAAVWSVVRRFDQPQVYKRFVRSCALLAGDGGVGTLREVRVVSGLPAASSRERLEVLDDESHVLSFRCVGGEHRLRNYLSVTTVHPSPAAPDAATVVVESYVVDVPPGNTPEDTRVFVDTIVKCNLQSLATTAEKLAAV

SEQ ID NO: 318 - protein, 218 aa, Artificial Sequence
  synthetic ZmPYLo homologous to AtPYR1 I110C
MPCLQASSPGSMPYQHHGRGVGCAAEAGAAVGASAGTGTRCGAHDGEVPAEAARHHEHAAPGPGRCCSAVVQRVAAPAEAVWSVVRRFDQPQAYKRFVRSCALLAGDGGVGTLREVRVVSGLPAASSRERLEVLDDESHVLSFRCVGGEHRLQNYLSVTTVHPSPAAPDAATVVVESYVVDVPPGNTPEDTRVFVDTIVKCNLQSLATTAEKLALAAV

SEQ ID NO: 319 - protein, 212 aa, Artificial Sequence
  synthetic ZmPYLi homologous to AtPYR1 I110C
MDQQGAGGDAEVPAGLGLTAAEYEQLRSTVDAHHRYAVGEGQCSSLLAQRIHAPPEAVWAVVRRFDCPQVYKHFIRSCALRPDPEAGDALCPGRLREVSVISGLPASTSTERLDLLDDAARVFGFSCTGGEHRLRNYRSVTTVSELADPAICTVVLESYVVDVPDGNTEDDTRLFADTVIRLNLQKLKSVAEANAAEAAATTNSVLLPRPAE

SEQ ID NO: 320 - protein, 205 aa, Artificial Sequence
  synthetic ZmPYLk homologous to AtPYR1 I110C
MDQQGAGGDVEVPAGLGLTAAEYEQLRPTVDAHHRYAVGEGQCSSLLAQRIHAPPAAVWAIVRRFDCPQVYKHFIRSCAVRPDPDAGDALRPGRLREVCVISGLPASTSTERLDHLDDAARVFGFSCTGGEHRLRNYRSVTTVSELAGPGICTVVLESYAVDVPDGNTEDDTRLFADTVIRLNLQKLKSVAEASTSSSAPPPPSE

SEQ ID NO: 321 - protein, 188 aa, Artificial Sequence
  synthetic ZmPYLj homologous to AtPYR1 I110C
MEPHMESALRQGLSEAEQRELEGVVRAHHTFPGRAPGTCTSLVTQRVDAPLAAVWPIVRGFGSPQRYKHFIKSCDLKAGDGATVGSVREVTVVSGLPASTSTERLEILDDHRHILSFRCVGGDHRLRNYRSVTSVTEFQPGPYCVVLESYVVDVPDGNTEEDTRMFTDTVVKLNLQKLAAIATSSSAN

SEQ ID NO: 322 - protein, 214 aa, Artificial Sequence
  synthetic ZmPYLd homologous to AtPYR1 I110C
MVVEMDGGVGVAAAGGGGAQTPAPPPPRRWRLADERCDLRAMETDYVRRFHRHEPRDHQCSSAVAKHIKAPVHLVWSLVRRFDQPQLFKPFVSRCEMKGNIEIGSVREVNVKSGLPATRSTERLELLDDDERILSVRCVGGDHRLQNYSSILSVTEFQPGPYCVVLESYVVDVPDGNTEEDTRMFTDTVVKLNLQKLAAIATSSSANQTEPLDR

SEQ ID NO: 323 - protein, 209 aa, Artificial Sequence
  synthetic ZmPYLf homologous to AtPYR1 I110C
MVMVEMDGGVGGGGGGGQTPAPRRWRLADERCDLRAMETDYVRRFHRHEPREHQCSSAVAKHIKAPVHLVWSLVRRFDQPQLFKPFVSRCEMKGNIEIGSVREVNVKSGLPATRSTERLELLDDNEHILSVRCVGGDHRLQNYSSILSVTEFQPGPYCVVLESYVVDVPDGNTEEDTRMFTDTVVKLNLQKLAAIATSSSANQTEPLDR

SEQ ID NO: 324 - protein, 197 aa, Artificial Sequence
  synthetic ZmPYLe homologous to AtPYR1 I110C
MVGLVGGSTARAEHVVANAGGEAEYVRRMHRHAPTEHQCTSTLVKHIKAPVHLVWELVRRFDQPQRYKPFVRNCVVRGDQLEVGSLRDVNVKTGLPATTSTERLEQLDDDLHILGVKCVGGDHRLQNYSSIITVHPESIDGRPGTLVIESFVVDVPDGNTKDETCYFVEAVIKCNLNSLAEVSEQLAVESPTSLIDQ

SEQ ID NO: 325 - protein, 197 aa, Artificial Sequence
  synthetic ZmPYLg homologous to AtPYR1 I110C
MVGLVGGSTARAEHVVANAGGETEYVRRLHRHAPAEHQCTSTLVKHIKAPVHLVWELVRSFDQPQRYKPFVRNCVVRGDQLEVGSLRDVNVKTGLPATTSTERLEQLDDDLHILGVKCVGGDHRLQNYSSIITVHPESIDGRPGTLVIESFVVDVPDGNTKDETCYFVEAVIKCNLKSLAEVSEQLAVESPTSPIDQ

SEQ ID NO: 326 - protein, 233 aa, Artificial Sequence
  synthetic ZmPYLc homologous to AtPYR1 I110S
MRERNSSIDQEHQRGSSSRSTMPFAASRTSQQQHSRVATNGRAVAVCAGHAGVPDEVARHHEHAVAAGQCCAAMVQSIAAPVDAVWSLVRRFDQPQRYKRFIRSCHLVDGDGAEVGSVRELLLVSGLPAESSRERLEIRDDERRVISFRSLGGDHRLANYRSVTTVHEAAPSQDGRPLTMVVESYVVDVPPGNTVEETRIFVDTIVRCNLQSLEGTVIRQLEIAAMPHDDNQN

SEQ ID NO: 327 - protein, 213 aa, Artificial Sequence
  synthetic ZmPYLl homologous to AtPYR1 I110S
MPYAATRTSPQQHSRVASNGRAVAACAGHAGVPDEVARHHEHAVAAGQCCSVMVQSIAAPADAVWSLVRRFDQPQGYKRFIRSCHLVDGDGVEVGSVRELLVVSGLPAENSRERLEIRDDERRVISFRSLGGDHRLANYRSVTTVHEAASEGGPLTMVVESYVVDVPPGNTVEETRIFVDTIVRCNLQSLEDTVIRQQAMAAPAAPHNDHNHS

SEQ ID NO: 328 - protein, 200 aa, Artificial Sequence
  synthetic ZmPYLa homologous to AtPYR1 I110S
MPYTAPRPSPQQHSRVLSGGGAKAASHGASCAAVPAEVARHHEHAARAGQCCSAVVQAIAAPVGAVWSVVRRFDRPQAYKHFIRSCRLVGGGDVAVGSVREVRVVSGLPATSSRERLEILDDERRVLSFRSVGGEHRLANYRSVTTVHEAGAGAGTGTVVVESYVVDVPHGNTADETRVFVDTIVRCNLQSLARTAERLA

SEQ ID NO: 329 - protein, 220 aa, Artificial Sequence
  synthetic ZmPYLb homologous to AtPYR1 I110S
MPCIQASSPGGMPHQHGRGRVLGGGVGCAAEVAAAVAASAGGMRCGAHDGEVPAEAARHHEHAAAGPGRCCSAVVQHVAAPAAAVWSVVRRFDQPQVYKRFVRSCALLAGDGGVGTLREVRVVSGLPAASSRERLEVLDDESHVLSFRSVGGEHRLRNYLSVTTVHPSPAAPDAATVVVESYVVDVPPGNTPEDTRVFVDTIVKCNLQSLATTAEKLAAV

SEQ ID NO: 330 - protein, 218 aa, Artificial Sequence
  synthetic ZmPYLo homologous to AtPYR1 I110S
MPCLQASSPGSMPYQHHGRGVGCAAEAGAAVGASAGTGTRCGAHDGEVPAEAARHHEHAAPGPGRCCSAVVQRVAAPAEAVWSVVRRFDQPQAYKRFVRSCALLAGDGGVGTLREVRVVSGLPAASSRERLEVLDDESHVLSFRSVGGEHRLQNYLSVTTVHPSPAAPDAATVVVESYVVDVPPGNTPEDTRVFVDTIVKCNLQSLATTAEKLALAAV

SEQ ID NO: 331 - protein, 212 aa, Artificial Sequence
  synthetic ZmPYLi homologous to AtPYR1 I110S
MDQQGAGGDAEVPAGLGLTAAEYEQLRSTVDAHHRYAVGEGQCSSLLAQRIHAPPEAVWAVVRRFDCPQVYKHFIRSCALRPDPEAGDALCPGRLREVSVISGLPASTSTERLDLLDDAARVFGFSSTGGEHRLRNYRSVTTVSELADPAICTVVLESYVVDVPDGNTEDDTRLFADTVIRLNLQKLKSVAEANAAEAAATTNSVLLPRPAE

SEQ ID NO: 332 - protein, 205 aa, Artificial Sequence
  synthetic ZmPYLk homologous to AtPYR1 I110S
MDQQGAGGDVEVPAGLGLTAAEYEQLRPTVDAHHRYAVGEGQCSSLLAQRIHAPPAAVWAIVRRFDCPQVYKHFIRSCAVRPDPDAGDALRPGRLREVCVISGLPASTSTERLDHLDDAARVFGFSSTGGEHRLRNYRSVTTVSELAGPGICTVVLESYAVDVPDGNTEDDTRLFADTVIRLNLQKLKSVAEASTSSSAPPPPSE

SEQ ID NO: 333 - protein, 188 aa, Artificial Sequence
  synthetic ZmPYLj homologous to AtPYR1 I110S
MEPHMESALRQGLSEAEQRELEGVVRAHHTFPGRAPGTCTSLVTQRVDAPLAAVWPIVRGFGSPQRYKHFIKSCDLKAGDGATVGSVREVTVVSGLPASTSTERLEILDDHRHILSFRSVGGDHRLRNYRSVTSVTEFQPGPYCVVLESYVVDVPDGNTEEDTRMFTDTVVKLNLQKLAAIATSSSAN

SEQ ID NO: 334 - protein, 214 aa, Artificial Sequence
  synthetic ZmPYLd homologous to AtPYR1 I110S
MVVEMDGGVGVAAAGGGGAQTPAPPPPRRWRLADERCDLRAMETDYVRRFHRHEPRDHQCSSAVAKHIKAPVHLVWSLVRRFDQPQLFKPFVSRCEMKGNIEIGSVREVNVKSGLPATRSTERLELLDDDERILSVRSVGGDHRLQNYSSILSVTEFQPGPYCVVLESYVVDVPDGNTEEDTRMFTDTVVKLNLQKLAAIATSSSANQTEPLDR

SEQ ID NO: 335 - protein, 209 aa, Artificial Sequence
  synthetic ZmPYLf homologous to AtPYR1 I110S
MVMVEMDGGVGGGGGGGQTPAPRRWRLADERCDLRAMETDYVRRFHRHEPREHQCSSAVAKHIKAPVHLVWSLVRRFDQPQLFKPFVSRCEMKGNIEIGSVREVNVKSGLPATRSTERLELLDDNEHILSVRSVGGDHRLQNYSSILSVTEFQPGPYCVVLESYVVDVPDGNTEEDTRMFTDTVVKLNLQKLAAIATSSSANQTEPLDR

SEQ ID NO: 336 - protein, 197 aa, Artificial Sequence
  synthetic ZmPYLe homologous to AtPYR1 I110S
MVGLVGGSTARAEHVVANAGGEAEYVRRMHRHAPTEHQCTSTLVKHIKAPVHLVWELVRRFDQPQRYKPFVRNCVVRGDQLEVGSLRDVNVKTGLPATTSTERLEQLDDDLHILGVKSVGGDHRLQNYSSIITVHPESIDGRPGTLVIESFVVDVPDGNTKDETCYFVEAVIKCNLNSLAEVSEQLAVESPTSLIDQ

SEQ ID NO: 337 - protein, 197 aa, Artificial Sequence
  synthetic ZmPYLg homologous to AtPYR1 I110S
MVGLVGGSTARAEHVVANAGGETEYVRRLHRHAPAEHQCTSTLVKHIKAPVHLVWELVRSFDQPQRYKPFVRNCVVRGDQLEVGSLRDVNVKTGLPATTSTERLEQLDDDLHILGVKSVGGDHRLQNYSSIITVHPESIDGRPGTLVIESFVVDVPDGNTKDETCYFVEAVIKCNLKSLAEVSEQLAVESPTSPIDQ

SEQ ID NO: 338 - protein, 233 aa, Artificial Sequence
  synthetic ZmPYLc homologous to AtPYR1 V81I
MRERNSSIDQEHQRGSSSRSTMPFAASRTSQQQHSRVATNGRAVAVCAGHAGVPDEVARHHEHAVAAGQCCAAMVQSIAAPVDAVWSLVRRFDQPQRYKRFIRSCHLVDGDGAEVGSVREILLVSGLPAESSRERLEIRDDERRVISFRVLGGDHRLANYRSVTTVHEAAPSQDGRPLTMVVESYVVDVPPGNTVEETRIFVDTIVRCNLQSLEGTVIRQLEIAAMPHDDNQN

SEQ ID NO: 339 - protein, 213 aa, Artificial Sequence
  synthetic ZmPYLl homologous to AtPYR1 V81I
MPYAATRTSPQQHSRVASNGRAVAACAGHAGVPDEVARHHEHAVAAGQCCSVMVQSIAAPADAVWSLVRRFDQPQGYKRFIRSCHLVDGDGVEVGSVREILVVSGLPAENSRERLEIRDDERRVISFRILGGDHRLANYRSVTTVHEAASEGGPLTMVVESYVVDVPPGNTVEETRIFVDTIVRCNLQSLEDTVIRQQAMAAPAAPHNDHNHS

SEQ ID NO: 340 - protein, 200 aa, Artificial Sequence
  synthetic ZmPYLa homologous to AtPYR1 V81I
MPYTAPRPSPQQHSRVLSGGGAKAASHGASCAAVPAEVARHHEHAARAGQCCSAVVQAIAAPVGAVWSVVRRFDRPQAYKHFIRSCRLVGGGDVAVGSVREIRVVSGLPATSSRERLEILDDERRVLSFRVVGGEHRLANYRSVTTVHEAGAGAGTGTVVVESYVVDVPHGNTADETRVFVDTIVRCNLQSLARTAERLA

SEQ ID NO: 341 - protein, 220 aa, Artificial Sequence
  synthetic ZmPYLb homologous to AtPYR1 V81I
MPCIQASSPGGMPHQHGRGRVLGGGVGCAAEVAAAVAASAGGMRCGAHDGEVPAEAARHHEHAAAGPGRCCSAVVQHVAAPAAAVWSVVRRFDQPQVYKRFVRSCALLAGDGGVGTLREIRVVSGLPAASSRERLEVLDDESHVLSFRVVGGEHRLRNYLSVTTVHPSPAAPDAATVVVESYVVDVPPGNTPEDTRVFVDTIVKCNLQSLATTAEKLAAV

SEQ ID NO: 342 - protein, 218 aa, Artificial Sequence
  synthetic ZmPYLo homologous to AtPYR1 V81I
MPCLQASSPGSMPYQHHGRGVGCAAEAGAAVGASAGTGTRCGAHDGEVPAEAARHHEHAAPGPGRCCSAVVQRVAAPAEAVWSVVRRFDQPQAYKRFVRSCALLAGDGGVGTLREIRVVSGLPAASSRERLEVLDDESHVLSFRVVGGEHRLQNYLSVTTVHPSPAAPDAATVVVESYVVDVPPGNTPEDTRVFVDTIVKCNLQSLATTAEKLALAAV

SEQ ID NO: 343 - protein, 212 aa, Artificial Sequence
  synthetic ZmPYLi homologous to AtPYR1 V81I
MDQQGAGGDAEVPAGLGLTAAEYEQLRSTVDAHHRYAVGEGQCSSLLAQRIHAPPEAVWAVVRRFDCPQVYKHFIRSCALRPDPEAGDALCPGRLREISVISGLPASTSTERLDLLDDAARVFGFSITGGEHRLRNYRSVTTVSELADPAICTVVLESYVVDVPDGNTEDDTRLFADTVIRLNLQKLKSVAEANAAEAAATTNSVLLPRPAE

SEQ ID NO: 344 - protein, 205 aa, Artificial Sequence
  synthetic ZmPYLk homologous to AtPYR1 V81I
MDQQGAGGDVEVPAGLGLTAAEYEQLRPTVDAHHRYAVGEGQCSSLLAQRIHAPPAAVWAIVRRFDCPQVYKHFIRSCAVRPDPDAGDALRPGRLREICVISGLPASTSTERLDHLDDAARVFGFSITGGEHRLRNYRSVTTVSELAGPGICTVVLESYAVDVPDGNTEDDTRLFADTVIRLNLQKLKSVAEASTSSSAPPPPSE

SEQ ID NO: 345 - protein, 188 aa, Artificial Sequence
  synthetic ZmPYLj homologous to AtPYR1 V81I
MEPHMESALRQGLSEAEQRELEGVVRAHHTFPGRAPGTCTSLVTQRVDAPLAAVWPIVRGFGSPQRYKHFIKSCDLKAGDGATVGSVREITVVSGLPASTSTERLEILDDHRHILSFRVVGGDHRLRNYRSVTSVTEFQPGPYCVVLESYVVDVPDGNTEEDTRMFTDTVVKLNLQKLAAIATSSSAN

SEQ ID NO: 346 - protein, 214 aa, Artificial Sequence
  synthetic ZmPYLd homologous to AtPYR1 V81I
MVVEMDGGVGVAAAGGGGAQTPAPPPPRRWRLADERCDLRAMETDYVRRFHRHEPRDHQCSSAVAKHIKAPVHLVWSLVRRFDQPQLFKPFVSRCEMKGNIEIGSVREINVKSGLPATRSTERLELLDDDERILSVRFVGGDHRLQNYSSILSVTEFQPGPYCVVLESYVVDVPDGNTEEDTRMFTDTVVKLNLQKLAAIATSSSANQTEPLDR

SEQ ID NO: 347 - protein, 213 aa, Artificial Sequence
  synthetic ZmPYLf homologous to AtPYR1 V81I
ZMPYMVMVEMDGGVGGGGGGGQTPAPRRWRLADERCDLRAMETDYVRRFHRHEPREHQCSSAVAKHIKAPVHLVWSLVRRFDQPQLFKPFVSRCEMKGNIEIGSVREINVKSGLPATRSTERLELLDDNEHILSVRFVGGDHRLQNYSSILSVTEFQPGPYCVVLESYVVDVPDGNTEEDTRMFTDTVVKLNLQKLAAIATSSSANQTEPLDR

SEQ ID NO: 348 - protein, 197 aa, Artificial Sequence
  synthetic ZmPYLe homologous to AtPYR1 V81I
MVGLVGGSTARAEHVVANAGGEAEYVRRMHRHAPTEHQCTSTLVKHIKAPVHLVWELVRRFDQPQRYKPFVRNCVVRGDQLEVGSLRDINVKTGLPATTSTERLEQLDDDLHILGVKFVGGDHRLQNYSSIITVHPESIDGRPGTLVIESFVVDVPDGNTKDETCYFVEAVIKCNLNSLAEVSEQLAVESPTSLIDQ

SEQ ID NO: 349 - protein, 197 aa, Artificial Sequence
  synthetic ZmPYLg homologous to AtPYR1 V81I
MVGLVGGSTARAEHVVANAGGETEYVRRLHRHAPAEHQCTSTLVKHIKAPVHLVWELVRSFDQPQRYKPFVRNCVVRGDQLEVGSLRDINVKTGLPATTSTERLEQLDDDLHILGVKFVGGDHRLQNYSSIITVHPESIDGRPGTLVIESFVVDVPDGNTKDETCYFVEAVIKCNLKSLAEVSEQLAVESPTSPIDQ

SEQ ID NO: 350 - protein, 233 aa, Artificial Sequence
  synthetic ZmPYLc homologous to AtPYR1 V81Y
MRERNSSIDQEHQRGSSSRSTMPFAASRTSQQQHSRVATNGRAVAVCAGHAGVPDEVARHHEHAVAAGQCCAAMVQSIAAPVDAVWSLVRRFDQPQRYKRFIRSCHLVDGDGAEVGSVREYLLVSGLPAESSRERLEIRDDERRVISFRVLGGDHRLANYRSVTTVHEAAPSQDGRPLTMVVESYVVDVPPGNTVEETRIFVDTIVRCNLQSLEGTVIRQLEIAAMPHDDNQN

SEQ ID NO: 351 - protein, 213 aa, Artificial Sequence
  synthetic ZmPYLl homologous to AtPYR1 V81Y
MPYAATRTSPQQHSRVASNGRAVAACAGHAGVPDEVARHHEHAVAAGQCCSVMVQSIAAPADAVWSLVRRFDQPQGYKRFIRSCHLVDGDGVEVGSVREYLVVSGLPAENSRERLEIRDDERRVISFRILGGDHRLANYRSVTTVHEAASEGGPLTMVVESYVVDVPPGNTVEETRIFVDTIVRCNLQSLEDTVIRQQAMAAPAAPHNDHNHS

SEQ ID NO: 352 - protein, 200 aa, Artificial Sequence
  synthetic ZmPYLa homologous to AtPYR1 V81Y
MPYTAPRPSPQQHSRVLSGGGAKAASHGASCAAVPAEVARHHEHAARAGQCCSAVVQAIAAPVGAVWSVVRRFDRPQAYKHFIRSCRLVGGGDVAVGSVREYRVVSGLPATSSRERLEILDDERRVLSFRVVGGEHRLANYRSVTTVHEAGAGAGTGTVVVESYVVDVPHGNTADETRVFVDTIVRCNLQSLARTAERLA

SEQ ID NO: 353 - protein, 220 aa, Artificial Sequence
  synthetic ZmPYLb homologous to AtPYR1 V81Y
MPCIQASSPGGMPHQHGRGRVLGGGVGCAAEVAAAVAASAGGMRCGAHDGEVPAEAARHHEHAAAGPGRCCSAVVQHVAAPAAAVWSVVRRFDQPQVYKRFVRSCALLAGDGGVGTLREYRVVSGLPAASSRERLEVLDDESHVLSFRVVGGEHRLRNYLSVTTVHPSPAAPDAATVVVESYVVDVPPGNTPEDTRVFVDTIVKCNLQSLATTAEKLAAV

SEQ ID NO: 354 - protein, 218 aa, Artificial Sequence
  synthetic ZmPYLo homologous to AtPYR1 V81Y
MPCLQASSPGSMPYQHHGRGVGCAAEAGAAVGASAGTGTRCGAHDGEVPAEAARHHEHAAPGPGRCCSAVVQRVAAPAEAVWSVVRRFDQPQAYKRFVRSCALLAGDGGVGTLREYRVVSGLPAASSRERLEVLDDESHVLSFRVVGGEHRLQNYLSVTTVHPSPAAPDAATVVVESYVVDVPPGNTPEDTRVFVDTIVKCNLQSLATTAEKLALAAV

SEQ ID NO: 355 - protein, 212 aa, Artificial Sequence
  synthetic ZmPYLi homologous to AtPYR1 V81Y
MDQQGAGGDAEVPAGLGLTAAEYEQLRSTVDAHHRYAVGEGQCSSLLAQRIHAPPEAVWAVVRRFDCPQVYKHFIRSCALRPDPEAGDALCPGRLREYSVISGLPASTSTERLDLLDDAARVFGFSITGGEHRLRNYRSVTTVSELADPAICTVVLESYVVDVPDGNTEDDTRLFADTVIRLNLQKLKSVAEANAAEAAATTNSVLLPRPAE

SEQ ID NO: 356 - protein, 205 aa, Artificial Sequence
  synthetic ZmPYLk homologous to AtPYR1 V81Y
MDQQGAGGDVEVPAGLGLTAAEYEQLRPTVDAHHRYAVGEGQCSSLLAQRIHAPPAAVWAIVRRFDCPQVYKHFIRSCAVRPDPDAGDALRPGRLREYCVISGLPASTSTERLDHLDDAARVFGFSITGGEHRLRNYRSVTTVSELAGPGICTVVLESYAVDVPDGNTEDDTRLFADTVIRLNLQKLKSVAEASTSSSAPPPPSE

SEQ ID NO: 357 - protein, 188 aa, Artificial Sequence
  synthetic ZmPYLj homologous to AtPYR1 V81Y
MEPHMESALRQGLSEAEQRELEGVVRAHHTFPGRAPGTCTSLVTQRVDAPLAAVWPIVRGFGSPQRYKHFIKSCDLKAGDGATVGSVREYTVVSGLPASTSTERLEILDDHRHILSFRVVGGDHRLRNYRSVTSVTEFQPGPYCVVLESYVVDVPDGNTEEDTRMFTDTVVKLNLQKLAAIATSSSAN

SEQ ID NO: 358 - protein, 214 aa, Artificial Sequence
  synthetic ZmPYLd homologous to AtPYR1 V81Y
MVVEMDGGVGVAAAGGGGAQTPAPPPPRRWRLADERCDLRAMETDYVRRFHRHEPRDHQCSSAVAKHIKAPVHLVWSLVRRFDQPQLFKPFVSRCEMKGNIEIGSVREYNVKSGLPATRSTERLELLDDDERILSVRFVGGDHRLQNYSSILSVTEFQPGPYCVVLESYVVDVPDGNTEEDTRMFTDTVVKLNLQKLAAIATSSSANQTEPLDR

SEQ ID NO: 359 - protein, 209 aa, Artificial Sequence
  synthetic ZmPYLf homologous to AtPYR1 V81Y
MVMVEMDGGVGGGGGGGQTPAPRRWRLADERCDLRAMETDYVRRFHRHEPREHQCSSAVAKHIKAPVHLVWSLVRRFDQPQLFKPFVSRCEMKGNIEIGSVREYNVKSGLPATRSTERLELLDDNEHILSVRFVGGDHRLQNYSSILSVTEFQPGPYCVVLESYVVDVPDGNTEEDTRMFTDTVVKLNLQKLAAIATSSSANQTEPLDR

SEQ ID NO: 360 - protein, 197 aa, Artificial Sequence
  synthetic ZmPYLe homologous to AtPYR1 V81Y
MVGLVGGSTARAEHVVANAGGEAEYVRRMHRHAPTEHQCTSTLVKHIKAPVHLVWELVRRFDQPQRYKPFVRNCVVRGDQLEVGSLRDYNVKTGLPATTSTERLEQLDDDLHILGVKFVGGDHRLQNYSSIITVHPESIDGRPGTLVIESFVVDVPDGNTKDETCYFVEAVIKCNLNSLAEVSEQLAVESPTSLIDQ

SEQ ID NO: 361 - protein, 197 aa, Artificial Sequence
  synthetic ZmPYLg homologous to AtPYR1 V81Y
MVGLVGGSTARAEHVVANAGGETEYVRRLHRHAPAEHQCTSTLVKHIKAPVHLVWELVRSFDQPQRYKPFVRNCVVRGDQLEVGSLRDYNVKTGLPATTSTERLEQLDDDLHILGVKFVGGDHRLQNYSSIITVHPESIDGRPGTLVIESFVVDVPDGNTKDETCYFVEAVIKCNLKSLAEVSEQLAVESPTSPIDQ

SEQ ID NO: 362 - DNA, 20 bp, Artificial Sequence
  synthetic ZmPYL-E genomic target sequence
cgcgacgtcaacgtcaagac

SEQ ID NO: 363 - RNA, 17 nt, Artificial Sequence
  synthetic gRNA nucleotide sequence
gacgucaacgucaagac

SEQ ID NO: 364 - RNA, 18 nt, Artificial Sequence
  synthetic gRNA nucleotide sequence
cgacgucaacgucaagac

SEQ ID NO: 365 - RNA, 19 nt, Artificial Sequence
  synthetic gRNA nucleotide sequence
gcgacgucaacgucaagac

SEQ ID NO: 366 - RNA, 20 nt, Artificial Sequence
  synthetic gRNA nucleotide sequence
cgcgacgucaacgucaagac

SEQ ID NO: 367 - RNA, 21 nt, Artificial Sequence
  synthethic gRNA nucleotide sequence
gcgcgacgucaacgucaagac

SEQ ID NO: 368 - DNA, 30 bp, Artificial Sequence
  synthetic maize ZmPYL-E genomic nucleotide sequence
gcaccctggtgatcgagtcgttcgtggtcg

SEQ ID NO: 369 - DNA, 20 bp, Artificial Sequence
  synthetic xZmPYLE-E149L sequence
cctggtgatcctgtcgttcg

SEQ ID NO: 370 - DNA, 76 bp, Artificial Sequence
  synthetic tracRNA scaffold sequence
gttttagagctagaaatagcaagttaaaataaggctagtccgttatcaacttgaaaaagtggcaccgagtcggtgc

SEQ ID NO: 371 - DNA, 480 bp, Artificial Sequence
  synthetic expression cassette sequence
gggatctttaaacatacgaacagatcacttaaagttcttctgaagcaacttaaagttatcaggcatgcatggatcttggaggaatcagatgtgcagtcagggaccatagcacaggacaggcgtcttctactggtgctaccagcaaatgctggaagccgggaacactgggtacgttggaaaccacgtgatgtggagtaagataaactgtaggagaaaagcatttcgtagtgggccatgaagcctttcaggacatgtattgcagtatgggccggcccattacgcaattggacgacaacaaagactagtattagtaccacctcggctatccacatagatcaaagctggtttaaaagagttgtgcagatgatccgtggcagcgacgtcaacgtcaagacgttttagagctagaaatagcaagttaaaataaggctagtccgttatcaacttgaaaaagtggcaccgagtcggtgcttttttttt

SEQ ID NO: 372 - DNA, 622 bp, Artificial Sequence
  synthetic expression cassette sequence
tttgtgaaagttgaattacggcatagccgaaggaataacagaatcgtttcacactttcgtaacaaaggtcttcttatcatgtttcagacgatggaggcaaggctgatcaaagtgatcaagcacataaacgcatttttttaccatgtttcactccataagcgtctgagattatcacaagtcacgtctagtagtttgatggtacactagtgacaatcagttcgtgcagacagagctcatacttgactacttgagcgattacaggcgaaagtgtgaaacgcatgtgatgtgggctgggaggaggagaatatatactaatgggccgtatcctgatttgggctgcgtcggaaggtgcagcccacgcgcgccgtaccgcgcgggtggcgctgctacccactttagtccgttggatggggatccgatggtttgcgcggtggcgttgcgggggatgtttagtaccacatcggaaaccgaaagacgatggaaccagcttataaacccgcgcgctgtagtcagcttgcgcgacgtcaacgtcaagacgttttagagctagaaatagcaagttaaaataaggctagtccgttatcaacttgaaaaagtggcaccgagtcggtgcttttttttt

SEQ ID NO: 373 - DNA, 622 bp, Artificial Sequence
  synthetic expression cassette sequence with SEQ ID NO:369 target sequence
tttgtgaaagttgaattacggcatagccgaaggaataacagaatcgtttcacactttcgtaacaaaggtcttcttatcatgtttcagacgatggaggcaaggctgatcaaagtgatcaagcacataaacgcatttttttaccatgtttcactccataagcgtctgagattatcacaagtcacgtctagtagtttgatggtacactagtgacaatcagttcgtgcagacagagctcatacttgactacttgagcgattacaggcgaaagtgtgaaacgcatgtgatgtgggctgggaggaggagaatatatactaatgggccgtatcctgatttgggctgcgtcggaaggtgcagcccacgcgcgccgtaccgcgcgggtggcgctgctacccactttagtccgttggatggggatccgatggtttgcgcggtggcgttgcgggggatgtttagtaccacatcggaaaccgaaagacgatggaaccagcttataaacccgcgcgctgtagtcagcttgcctggtgatcgagtcgttcggttttagagctagaaatagcaagttaaaataaggctagtccgttatcaacttgaaaaagtggcaccgagtcggtgcttttttttt

SEQ ID NO: 374 - DNA, 481 bp, Artificial Sequence
  synthetic expression cassette sequence with SEQ ID NO:369 target sequence
gggatctttaaacatacgaacagatcacttaaagttcttctgaagcaacttaaagttatcaggcatgcatggatcttggaggaatcagatgtgcagtcagggaccatagcacaggacaggcgtcttctactggtgctaccagcaaatgctggaagccgggaacactgggtacgttggaaaccacgtgatgtggagtaagataaactgtaggagaaaagcatttcgtagtgggccatgaagcctttcaggacatgtattgcagtatgggccggcccattacgcaattggacgacaacaaagactagtattagtaccacctcggctatccacatagatcaaagctggtttaaaagagttgtgcagatgatccgtggcacctggtgatcgagtcgttcggttttagagctagaaatagcaagttaaaataaggctagtccgttatcaacttgaaaaagtggcaccgagtcggtgcttttttttt

SEQ ID NO: 375 - DNA, 40 bp, Artificial Sequence
  synthetic repair DNA sequence
gcagcctgcgcgacgccaacgtcaagaccggcctgccggc

SEQ ID NO: 376 - DNA, 50 bp, Artificial Sequence
  synthetic repair DNA sequence
ggtcggcagcctgcgcgacgccaacgtcaagaccggcctgccggcgacga

SEQ ID NO: 377 - DNA, 70 bp, Artificial Sequence
  synthetic repair DNA sequence
accagctcgaggtcggcagcctgcgcgacgccaacgtcaagaccggcctgccggcgacgaccagaaccga

SEQ ID NO: 378 - DNA, 111 bp, Artificial Sequence
  synthetic repair DNA sequence
gaactgcgtcgtgcgcggggaccagctcgaggtcggcagcctgcgcgacgccaacgtcaagaccggcctgccggcgacgaccagaaccgagcgcctcgagcagctcgacga

SEQ ID NO: 379 - DNA, 60 bp, Artificial Sequence
  synthetic repair donor oligonucleotide sequence
tgacgggaggccgggcaccctggtgatcctgtcgttcgtagtcgatgtgcctgatggcaa

SEQ ID NO: 380 - DNA, 72 bp, Artificial Sequence
  synthetic repair donor oligonucleotide sequence
  misc_feature (1)..(4): phosphorothioate linkage between nucleotides
  misc_feature (69)..(72): phosphorothioate linkage between nucleotides
ttcgtgttgccatcaggcacatcgactacgaacgacaggatcaccagggtgcccggcctcccgtcaatgctc

SEQ ID NO: 381 - DNA, 41 bp, Artificial Sequence
  synthetic repair DNA sequence
ggcagcctgcgcgacatcaacgtcaagaccggcctgccggc

SEQ ID NO: 382 - DNA, 51 bp, Artificial Sequence
  synthetic repair DNA sequence
aggtcggcagcctgcgcgacatcaacgtcaagaccggcctgccggcgacga

SEQ ID NO: 383 - DNA, 71 bp, Artificial Sequence
  synthetic repair DNA sequence
gaccagctcgaggtcggcagcctgcgcgacatcaacgtcaagaccggcctgccggcgacgaccagaaccga

SEQ ID NO: 384 - DNA, 112 bp, Artificial Sequence
  synthetic repair DNA sequence
ggaactgcgtcgtgcgcggggaccagctcgaggtcggcagcctgcgcgacatcaacgtcaagaccggcctgccggcgacgaccagaaccgagcgcctcgagcagctcgacga

SEQ ID NO: 385 - DNA, 41 bp, Artificial Sequence
  synthetic repair DNA sequence
ggcagcctgcgcgactacaacgtcaagaccggcctgccggc

SEQ ID NO: 386 - DNA, 51 bp, Artificial Sequence
  synthetic repair DNA sequence
aggtcggcagcctgcgcgactacaacgtcaagaccggcctgccggcgacga

SEQ ID NO: 387 - DNA, 71 bp, Artificial Sequence
  synthetic repair DNA sequence
gaccagctcgaggtcggcagcctgcgcgactacaacgtcaagaccggcctgccggcgacgaccagaaccga

SEQ ID NO: 388 - DNA, 112 bp, Artificial Sequence
  synthetic repair DNA sequence
ggaactgcgtcgtgcgcggggaccagctcgaggtcggcagcctgcgcgactacaacgtcaagaccggcctgccggcgacgaccagaaccgagcgcctcgagcagctcgacga

SEQ ID NO: 389 - protein, 197 aa, Artificial Sequence
  synthetic PYR/PYL receptor polypeptide comprising subtitution V89A in PYL-E
MVGLVGGSTARAEHVVANAGGEAEYVRRMHRHAPTEHQCTSTLVKHIKAPVHLVWELVRRFDQPQRYKPFVRNCVVRGDQLEVGSLRDANVKTGLPATTSTERLEQLDDDLHILGVKFVGGDHRLQNYSSIITVHPESIDGRPGTLVIESFVVDVPDGNTKDETCYFVEAVIKCNLNSLAEVSEQLAVESPTSLIDQ

SEQ ID NO: 390 - protein, 197 aa, Artificial Sequence
  synthetic PYR/PYL receptor polypeptide comprising substitutions V89A and E149L in PYL-E
MVGLVGGSTARAEHVVANAGGEAEYVRRMHRHAPTEHQCTSTLVKHIKAPVHLVWELVRRFDQPQRYKPFVRNCVVRGDQLEVGSLRDANVKTGLPATTSTERLEQLDDDLHILGVKFVGGDHRLQNYSSIITVHPESIDGRPGTLVILSFVVDVPDGNTKDETCYFVEAVIKCNLNSLAEVSEQLAVESPTSLIDQ

SEQ ID NO: 391 - protein, 197 aa, Artificial Sequence
  synthetic PYR/PYL receptor polypeptide comprising substitutions V89I and E149L in PYL-E
MVGLVGGSTARAEHVVANAGGEAEYVRRMHRHAPTEHQCTSTLVKHIKAPVHLVWELVRRFDQPQRYKPFVRNCVVRGDQLEVGSLRDINVKTGLPATTSTERLEQLDDDLHILGVKFVGGDHRLQNYSSIITVHPESIDGRPGTLVILSFVVDVPDGNTKDETCYFVEAVIKCNLNSLAEVSEQLAVESPTSLIDQ

SEQ ID NO: 392 - protein, 197 aa, Artificial Sequence
  synthetic PYR/PYL receptor polypeptide comprising substitutions V89Y and E149L in PYL-E
MVGLVGGSTARAEHVVANAGGEAEYVRRMHRHAPTEHQCTSTLVKHIKAPVHLVWELVRRFDQPQRYKPFVRNCVVRGDQLEVGSLRDYNVKTGLPATTSTERLEQLDDDLHILGVKFVGGDHRLQNYSSIITVHPESIDGRPGTLVILSFVVDVPDGNTKDETCYFVEAVIKCNLNSLAEVSEQLAVESPTSLIDQ

SEQ ID NO: 393 - DNA, 20 bp, Artificial Sequence
  synthetic gRNA target sequence
gtcggggacgtcgacgacga

SEQ ID NO: 394 - DNA, 20 bp, Artificial Sequence
  synthetic gRNA target sequence
gaggtcatcgacggccggcc

SEQ ID NO: 395 - DNA, 23 bp, Artificial Sequence
  synthetic gRNA target sequence
gctcgtgatcgagtccttcgtgg

SEQ ID NO: 396 - DNA, 20 bp, Artificial Sequence
  synthetic gRNA target sequence
gctcgtgatcgagtccttcg

SEQ ID NO: 397 - DNA, 20 bp, Artificial Sequence
  synthetic gRNA target sequence
cgtcgacgacgtaggactcg

SEQ ID NO: 398 - skipped

SEQ ID NO: 399 - DNA, 75 bp, Artificial Sequence
  synthetic repair donor DNA oligonucleotide
ccttggtgttgccgtcggggacgtcgacgacgaatgacaggatgacgagcgtccctggccggccgtcgatgacct

SEQ ID NO: 400 - DNA, 75 bp, Artificial Sequence; identical to SEQ ID NO: 399
  synthetic repair donor DNA oligonucleotide
  misc_feature (1)..(4): phosphorothioate linkage between nucleotides
  misc_feature (72)..(75): phosphorothioate linkage between nucleotides

SEQ ID NO: 401 - DNA, 88 bp, Artificial Sequence
  synthetic repair donor DNA oligonucleotide
ccatcctcaccgtccacccggaggtcatcgacggccgaccagggacgctcgtcatcctgtccttcgtcgtcgacgtccccgacggcaa

SEQ ID NO: 402 - DNA, 60 bp, Artificial Sequence
  synthetic repair donor DNA oligonucleotide
cgacggccgaccggggacgctcgtgatcctgtccttcgtggtggacgtccccgacggcaa

SEQ ID NO: 403 - DNA, 60 bp, Artificial Sequence
  synthetic repair donor DNA oligonucleotide
cgacggccgaccggggacgctcgtgatcctgtccttcgtagtggacgtccccgacggcaa

SEQ ID NO: 404 - DNA, 77 bp, Artificial Sequence
  synthetic repair donor DNA oligonucleotide
aggtcatcgacggccgaccggggacgctcgtgatcctgtccttcgtagtggacgtccccgacggcaacaccaaggac

SEQ ID NO: 405 - DNA, 77 bp, Artificial Sequence
  synthetic repair donor DNA oligonucleotide
gtccttggtgttgccgtcggggacgtccactacgaaggacaggatcacgagcgtccccggtcggccgtcgatgacct

SEQ ID NO: 406 - DNA, 77 bp, Artificial Sequence; identical to SEQ ID NO: 405
  synthetic repair donor DNA oligonucleotide
  misc_feature (1)..(4): phosphorothioate linkage between nucleotides
  misc_feature (74)..(77): phosphorothioate linkage between nucleotides

SEQ ID NO: 407 - DNA, 68 bp, Artificial Sequence
  synthetic repair donor DNA oligonucleotide
caccgagttccagccgggcccctactgcgtcgtgctcctgtcctacgtcgtcgacgtccccgacggca

SEQ ID NO: 408 - DNA, 68 bp, Artificial Sequence
  synthetic repair donor DNA oligonucleotide
tgccgtcggggacgtcgacgacgtaggacaggagcacgacgcagtaggggcccggctggaactcggtg

SEQ ID NO: 409 - DNA, 68 bp, Artificial Sequence; identical to SEQ ID NO: 408
  synthetic repair donor DNA oligonucleotide
  misc_feature (1)..(4): phosphorothioate linkage between nucleotides
  misc_feature (65)..(68): phosphorothioate linkage between nucleotides

SEQ ID NO: 410 - DNA, 88 bp, Artificial Sequence
  synthetic repair donor DNA oligonucleotide
tcacctccgtcaccgagttccagccgggcccctactgcgtcgtgctcctgtcctacgtcgtcgacgtccccgacggcaacaccgagga

SEQ ID NO: 411 - protein, 23 aa, Artificial Sequence
  synthetic peptide comprising linker and tobacco etch virus (TEV) protease cleavage site
GGGSQFGSGGGGGSGSENLYFQS

SEQ ID NO: 412 - DNA, 30 bp, Artificial Sequence
  synthetic maize ZmPYL-E mutant sequence
gcaccctggtgatcctgtcgttcgtggtcg

SEQ ID NO: 413 - DNA, 85 bp, Artificial Sequence
  synthetic termination sequence
gttttagagctagaaatagcaagttaaaataaggctagtccgttatcaacttgaaaaagtggcaccgagtcggtgcttttttttt

SEQ ID NO: 414 - DNA, 56 bp, Artificial Sequence
  synthetic maize ZmPYL-F wild-type sequence
gacggccgaccggggacgctcgtgatcgagtccttcgtggtggacgtccccgacgg

SEQ ID NO: 415 - DNA, 57 bp, Artificial Sequence
  synthetic maize ZmPYL-F sequence with targeted mutation 1a
gacggccgaccggggacgctcgtgatcgagtccttcgatggtggacgtccccgacgg

SEQ ID NO: 416 - DNA, 9 bp, Artificial Sequence
  synthetic maize ZmPYL-F sequence with targeted mutation 1b
ccccgacgg

SEQ ID NO: 417 - DNA, 53 bp, Artificial Sequence
  synthetic maize ZmPYL-F sequence with targeted mutation 2a
gacggccgaccggggacgctcgtgatcgagtccttggtggacgtccccgacgg

SEQ ID NO: 418 - DNA, 38 bp, Artificial Sequence
  synthetic maize ZmPYL-F sequence with targeted mutation 2b
gacggccgaccggggacgctcgtgatcgagcccgacgg

SEQ ID NO: 419 - DNA, 55 bp, Artificial Sequence
  synthetic maize ZmPYL-F sequence with targeted mutation 3a
gacggccgaccggggacgctcgtgatcgagtccttctggtggacgtccccgacgg

SEQ ID NO: 420 - DNA, 57 bp, Artificial Sequence
  synthetic maize ZmPYL-F sequence with targeted mutation 3b
gacggccgaccggggacgctcgtgatcgagtccttcggtggtggacgtccccgacgg

SEQ ID NO: 421 - DNA, 55 bp, Artificial Sequence
  ynthetic maize ZmPYL-F sequence with targeted mutation 4a
gacggccgaccggggacgctcgtgatcgagtccttcgggtggacgtccccgacgg

SEQ ID NO: 422 - DNA, 57 bp, Artificial Sequence; identical to SEQ ID NO: 420
  synthetic maize ZmPYL-F sequence with targeted mutation 4b

SEQ ID NO: 423 - DNA, 63 bp, Artificial Sequence
  synthetic maize ZmPYL-F sequence with targeted mutation 5
gacggccgaccggggacgctcgtgatcgagtccttctcaagtgcaacctcaagtccccgacgg

SEQ ID NO: 424 - DNA, 41 bp, Artificial Sequence
  synthetic maize ZmPYL-F sequence with targeted mutation 6
gacggccgaccggggacgctcgtgatcgagtcccccgacgg

SEQ ID NO: 425 - DNA, 49 bp, Artificial Sequence
  synthetic maize ZmPYL-F sequence with targeted mutation 7a
gacggccgaccggggacgctcgtgatcgagtggtggacgtccccgacgg

SEQ ID NO: 426 - DNA, 55 bp, Artificial Sequence; identical to SEQ ID NO: 421
  synthetic maize ZmPYL-F sequence with targeted mutation 7b

SEQ ID NO: 427 - DNA, 57 bp, Artificial Sequence
  synthetic maize ZmPYL-F sequence with targeted mutation 8a
gacggccgaccggggacgctcgtgatcgagtccttcgttggtggacgtccccgacgg

SEQ ID NO: 428 - DNA, 46 bp, Artificial Sequence
  synthetic maize ZmPYL-F sequence with targeted mutation 8b
gacggccgaccggggacgctcgtgatcgagtggacgtccccgacgg

SEQ ID NO: 429 - DNA, 51 bp, Artificial Sequence
  synthetic maize ZmPYL-F sequence with targeted mutation 9a
gacggccgaccggggacgctcgtgatcgagtccttcgacgtccccgacggc

SEQ ID NO: 430 - DNA, 29 bp, Artificial Sequence
  synthetic maize ZmPYL-F sequence with targeted mutation 9b
gacggccgaccggggacgtccccgacggc

SEQ ID NO: 431 - DNA, 30 bp, Artificial Sequence
  synthetic gRNA target sequence
gctcgtgatcgagtccttcgtggtggacgt
